(19) United States
(12) Patent Application Publication
(10) Pub. No.: US 2002/0102532 A1
(43) Pub. Date: Aug. 1, 2002

(54) Cancer gene determination and therapeutic screening using signature gene sets

(76) Inventor: Meena Augustus, Burtonsville, MD (US)

Correspondence Address: Alan J. Grant, Esq., c/o CARELLA, BYRNE, BAIN, GILFILLAN,, CECCHI, STEWART & OLSTEIN, 6 Becker Farm Road, Roseland, NJ, 07068, US

(21) Appl. No.: 09/969,708

(22) Filed: Oct. 3, 2001

Related U.S. Application Data
(60) Provisional application No. 60/237,606, filed on Oct. 3, 2000.
(60) Provisional application No. 60/237,608, filed on Oct. 3, 2000.
(60) Provisional application No. 60/237,425, filed on Oct. 3, 2000.

(51) Int. Cl. C12Q 1/00; C12Q 1/68

(52) U.S. Cl. 435/4; 435/6

(57) ABSTRACT

Processes for assaying potential antitumor agents based on their modulation of the expression of specified genes, or sets, of suspected cancer cell genes, especially for prostatic cancer, are disclosed, along with methods for diagnosing cancerous, or potentially cancerous, conditions as a result of the expression, or patterns of expression, of such genes, or sets of genes. Also disclosed are methods for determining functionally related genes, or gene sets, as well as methods for treating cancer based on targeting expression products of such genes, or gene sets, and determining genes involved in the cancerous process.

[0001] This application claims priority of U.S. Provisional Application No. 60/237,606, filed Oct. 3, 2000, No. 60/237,608, filed Oct. 3, 2000, and No. 60/237,425, filed Oct. 3, 2001, the disclosures of which are hereby incorporated by reference in their entirety.

### FIELD OF THE INVENTION

[0002] The present invention relates to methods of assaying potential anti-tumor agents based on their modulation of the expression of specified sets of genes and methods for diagnosing cancerous, or potentially cancerous, conditions as a result of the patterns of expression of such genes.

### BACKGROUND OF THE INVENTION

[0003] Screening assays for novel drugs are based on the response of model cell based systems in vitro to treatment with specific compounds. Various measures of cellular response have been utilized, including the release of cytokines, alterations in cell surface markers, activation of specific enzymes, as well as alterations in ion flux and/or pH. Some such screens rely on specific genes, such as oncogenes (or gene mutations).

### BRIEF SUMMARY OF THE INVENTION

[0004] In accordance with the present invention, there are provided characteristic sets of gene sequences whose expression, or non-expression, or change in expression, either an increase or decrease thereof, are indicative of the cancerous or non-cancerous status of a given cell, especially prostate. More particularly, such genes whose expression is changed in cancerous, as compared to non-cancerous cells, from a specific tissue (in particular, prostate) are genes that include one of the nucleotide sequences of SEQ ID NO: 1-658, or sequences that are substantially identical to, or incorporated in, these sequences. Such a change in expression may be an increase or a decrease in expression or activity of the gene or gene sequences disclosed herein.

[0005] It is another object of the present invention to provide methods of using such characteristic, or signature, gene sets as a basis for assaying the potential ability of selected chemical agents to modulate upward or downward the expression of said characteristic, or signature, gene sets.

[0006] It is a further object of the present invention to provide methods of detecting the expression, or non-expression, or amount of expression, of said characteristic, or signature, gene sets, or portions thereof, as a means of determining the cancerous, or non-cancerous, status (or potential cancerous status) of selected cells as grown in culture or as maintained in situ.

[0007] It is a still further object of the present invention to provide methods for treating cancerous conditions utilizing selected chemical agents as determined from their ability to modulate (i.e., increase or decrease) the selected characteristic, or signature, gene sets as disclosed herein, where said genes include, or comprise, one of the sequences of SEQ ID NO: 1-658, or sequences substantially identical to said sequences, or characteristic portions of said sequences.

[0008] In one aspect, the present invention relates to a process for identifying an agent that modulates the activity of a cancer-related gene comprising:

[0009] (a) contacting a compound with a cell containing a gene corresponding to (such as a gene that encodes an RNA at least 90%, preferably at least 95%, identical to the RNA encoded by or complementary to) a polynucleotide comprising, or having, a sequence selected from the group consisting of SEQ ID NO: 1-658 and under conditions promoting the expression of said gene; and

[0010] (b) detecting a difference in expression of said gene relative to when said compound is not present

[0011] thereby identifying an agent that modulates the activity of a cancer-related gene. Such a process is especially useful for agents effective against cancer of the prostate, including carcinomas, especially adenocarcinoma.

[0012] The present invention also relates to a process for identifying an anti-neoplastic agent comprising contacting a cell exhibiting neoplastic activity with a compound first identified as a cancer-related gene modulator using an assay process as disclosed herein for determining gene modulating activity and detecting a decrease in said neoplastic activity after said contacting compared to when said contacting does not occur.

[0013] In a further aspect, the present invention relates to a process for identifying an anti-neoplastic or anti-tumor agent comprising administering to an animal exhibiting a cancerous condition an effective amount of an agent first identified according to a process as disclosed herein and detecting a decrease in said cancerous condition thereby identifying such an agent, said decrease including the death of the cancerous cell or cells.

[0014] The present invention also relates to a process for determining the cancerous status of a cell, comprising determining the level of expression in said cell of at least one gene that corresponds to a polynucleotide comprising, or having, a sequence selected from the group consisting of SEQ ID NO: 1-658 wherein an elevated expression relative to a known non-cancerous cell when the sequence is one of SEQ ID NO: 1-362 and 601-658 or a reduced expression relative to a known non-cancerous cell when the sequence is one of SEQ ID NO: 363-600, indicates a cancerous state or potentially cancerous state. Such sequence identity may include 100 percent identical as defined herein and any number of such genes may be used. Said non-cancerous cell is preferably a prostate cell.

[0015] In an additional aspect, the present invention relates to a process for determining a cancer initiating or facilitating gene comprising contacting a cell expressing a test gene (i.e., a gene whose status as a cancer initiating or facilitating gene is to be determined) with an agent that decreases the expression of a gene that encodes an RNA at least 90%, preferably 95%, identical to an RNA encoded by (i.e., a gene corresponding to) a polynucleotide comprising, or having, a sequence selected from the group consisting of SEQ ID NO: 1-362 and 601-658 and detecting a decrease in expression of said test gene compared to when said agent is not present, thereby identifying said test gene as being a cancer initiating or facilitating gene. Such genes may, of course, be oncogenes and said decrease in expression may be due to a decrease in copy number of said gene in said cell or a cell derived from said cell, such as where copy number is reduced in the cells formed by replication of such cells.

[0016] The present invention also relates to a process for determining a cancer suppressor gene comprising contacting a cell expressing a test gene (i.e., a gene whose status as a cancer suppressor gene is to be determined) with an agent that increases the expression of a gene that corresponds to (i.e., encodes an RNA at least 90%, preferably 95%, identical to an RNA encoded by or complementary to) a polynucleotide comprising a sequence selected from the group consisting of SEQ ID NO: 363-600 and detecting an increase in expression of said test gene compared to when said agent is not present, thereby identifying said test gene as being a cancer suppressor gene. The sequence identity may include identical sequences, as defined herein, and such a process includes embodiments wherein the increase in expression is due to an increase in copy number of the gene in said cell or a cell derived from said cell, such as following cellular replication.

[0017] In another aspect, the present invention relates to a process for treating cancer comprising contacting a cancerous cell with an agent having activity against an expression product encoded by a gene corresponding to a polynucleotide comprising a nucleotide sequence selected from at least one of SEQ ID NO: 1-362 and 601-658. Such a process includes an embodiment wherein the cancerous cell is contacted in vivo. The agent may include an antibody. In a preferred embodiment, the cancer is cancer of the prostate, especially a carcinoma, most preferably adenocarcinoma.

[0018] The present invention also relates to a method for producing a product comprising identifying an agent according to the assay processes of the invention wherein said product is the data collected with respect to said agent as a result of said process and wherein said data is sufficient to convey the chemical structure and/or properties of said agent.

[0019] The present invention further relates to a process for treating a cancerous condition in an animal afflicted therewith comprising administering to said animal a therapeutically effective amount of an agent first identified as having anti-neoplastic activity using one or more of the processes of the invention.

[0020] In a further aspect, the present invention relates to a process for protecting an animal against cancer comprising administering to an animal at risk of developing cancer a therapeutically effective amount of an agent first identified as having anti-neoplastic activity using one or more of the processes disclosed herein.

### DETAILED SUMMARY OF THE INVENTION

[0021] The present invention relates to methods of assaying for potential antitumor agents based on their modulation of the expression of specified sets of genes and methods for diagnosing cancerous, or potentially cancerous, conditions, especially of prostate, as a result of the patterns of expression of such gene sets and for determining cancer-inducing or regulating genes, and gene sets, based on common expression or regulation of such genes, or gene sets.

[0022] In accordance with the present invention, model cellular systems using cell lines, primary cells, or tissue samples are maintained in growth medium and may be treated with compounds that may be at a single concentration or at a range of concentrations. At specific times after treatment, cellular RNAs are isolated from the treated cells, primary cells or tumors, which RNAs are indicative of expression of selected genes. The cellular RNA is then divided and subjected to analysis that detects the presence and/or quantity of specific RNA transcripts, which transcripts may then be amplified for detection purposes using standard methodologies, such as, for example, reverse transcriptase polymerase chain reaction (RT-PCR), etc. The presence or absence, or levels, of specific RNA transcripts are determined from these measurements and a metric derived for the type and degree of response of the sample to the treated compound compared to control samples.

[0023] Also in accordance with the present invention, there are disclosed herein characteristic, or signature, sets of genes and gene sequences whose expression is, or can be, as a result of the methods of the present invention, linked to, or used to characterize, the cancerous, or non-cancerous, status of the cells, or tissues, to be tested, especially tissues derived from prostate (i.e., cancer-related genes and gene sequences). Thus, the methods of the present invention identify novel anti-neoplastic agents based on their alteration of expression of small sets of characteristic, or indicator, or signature genes in specific model systems. The methods of the invention may therefore be used with a variety of cell lines or with primary samples from tumors maintained in vitro under suitable culture conditions for varying periods of time, or in situ in suitable animal models.

[0024] More particularly, certain genes have been identified that are expressed at levels in cancer cells that are different than the expression levels in non-cancer cells. In one instance, the identified genes are expressed at higher levels in cancer cells than in normal cells. In another instance, the identified genes are expressed at lower levels in cancer cells as compared to normal cells.

[0025] In accordance with the foregoing, the present invention relates to a process for determining the cancerous status of a cell, comprising determining the level of expression in said cell of at least one gene that corresponds to (i.e., encodes an RNA at least 95% identical to the RNA encoded by or complementary to) a polynucleotide comprising a sequence selected from the group consisting of SEQ ID NO: 1-658 wherein an elevated expression relative to a known non-cancerous cell when the sequence is one of SEQ ID NO: 1-362 and 601-658, or a reduced expression relative to a known non-cancerous cell when the sequence is one of SEQ ID NO: 363-600, indicates a cancerous state or potentially cancerous state. Such sequence identity may include 100 percent identical as defined herein and any number of such genes may be used.

[0026] Thus, the present invention also relates to a process for identifying an anti-neoplastic agent comprising contacting a cell exhibiting neoplastic activity with a compound first identified as a cancer-related gene modulator using an assay process as disclosed herein for determining gene modulating activity and detecting a decrease in said neoplastic activity after said contacting compared to when said contacting does not occur (i.e., comparing expression when said agent is present versus when said agent is not present).

[0027] In preferred embodiments of the present invention, such cancer is prostatic cancer, such as a prostatic carcinoma, preferably adenocarcinoma.

[0028] In a further aspect, the present invention relates to a process for identifying an anti-neoplastic agent comprising administering to an animal exhibiting a cancerous condition an effective amount of an agent first identified as having such activity using a process as disclosed herein and detecting a decrease in said cancerous condition thereby identifying such an agent.

[0029] It should be kept in mind that the anti-tumor or anti-neoplastic agents identified by the processes of the invention include both novel agents whose structure and anti-tumor activity were not previously known prior to identification of their activity by the processes herein as well as non-novel agents, whose structure was known but whose therapeutic value as anti-tumor agents was not appreciated prior to identification by the assay processes of the invention.

[0030] In accordance with the foregoing, the present invention relates to a process for screening for an anti-neoplastic agent comprising the steps of:

[0031] (a) contacting a compound with a cell containing a polynucleotide comprising a nucleotide sequence selected from the group consisting of SEQ ID NO: 1-658, or a sequence at least 90%, preferably at least 95%, identical thereto, under conditions wherein said polynucleotide is being expressed, and

[0032] (b) determining a change in expression of at least one of said polynucleotides,

[0033] wherein a change in expression is indicative of anti-neoplastic activity.

[0034] In particular embodiments, such change in expression may be an increase or a decrease in expression or activity. Of course, decreased expression of cancer initiating or facilitating genes is highly desirable, as is an increased expression of cancer suppressor genes.

[0035] More particularly, the present invention relates to a process for screening for an anti-neoplastic agent comprising the steps of:

[0036] (a) exposing a known cancerous cell to a chemical agent to be tested for antineoplastic activity;

[0037] (b) allowing said chemical agent to modulate the activity of one or more genes present in said cell wherein said genes include or comprise one of the sequences selected from the group consisting of the sequences of SEQ ID NO: 1-658, sequences substantially identical to said sequences, or the complements of any of the foregoing;

[0038] (c) determining the expression of one or more genes of step (b);

[0039] (d) comparing the expression of said genes in the presence or absence of exposure to said chemical agent;

[0040] wherein a difference in expression is indicative of the ability of anti-neoplastic activity.

[0041] Thus, in one aspect, the present invention relates to a process for identifying an agent, such as an organic compound, that modulates the activity of a cancer-related gene, such as cancer of the prostate, comprising:

[0042] (a) contacting a compound with a cell containing a gene that encodes an RNA at least 90%, preferably at least 95%, identical to the RNA encoded by (i.e., a gene that corresponds to) a polynucleotide comprising, or having, a sequence selected from the group consisting of SEQ ID NO: 1-658 and under conditions promoting the expression of said gene; and

[0043] (b) detecting a difference in expression of said gene relative to when said compound is not present thereby identifying an agent that modulates the activity of a cancer-related gene.

[0044] Such sequence identity includes embodiments wherein the RNAs are at least 97 or 98% identical in sequence as well as cases where the sequence is the same, thus where a gene encodes an RNA with the same nucleotide sequence as an RNA encoded by one of the sequences of SEQ ID NO: 1-658.

[0045] In one embodiment of such processes, the sequence is selected from SEQ ID NO: 1-362 and 601-658, and said difference in expression when said agent is present is a decrease in expression. Here, the gene used encodes an RNA like that encoded by (or at least 90%, preferably at least 95%, identical to) one of the sequences found to be expressed at an elevated level in cancer cells, especially prostate cancer cells. In another such embodiment, the sequence is selected from SEQ ID NO: 363-600 and said difference in expression is an increase in expression. The latter sequences encode RNAs found to be expressed at higher levels in normal cells, such as prostate cells, as opposed to cancer cells.

[0046] In specific embodiments of the present invention, said chemical agent to be tested modulates the expression of more than one said gene, especially where it modulates at least two said genes, more especially where at least 3, or at least 5 of said genes, or even 10 or more of said genes in said signature set, are modulated. In a preferred embodiment, this may include more than 10 (such as 20, 50 or even 100) or even all of said genes are modulated.

[0047] In one embodiment of the present invention, said gene modulation is downward modulation, so that, as a result of exposure to the chemical agent to be tested, one or more genes of the cancerous cell will be expressed at a lower level (or not expressed at all) when exposed to (i.e., contacted with) the agent as compared to the expression when not exposed to the agent (i.e., when said agent is not present).

[0048] In a preferred embodiment a selected set of said genes are expressed in the reference cell but not expressed in the cell to be tested as a result of the contacting or exposure of the test cell with the chemical agent. Thus, where said chemical agent causes the gene, or genes, of the tested cell to be expressed at a lower level than the same genes of the reference cell, this is indicative of downward modulation and indicates that the chemical agent to be tested has anti-neoplastic activity (or activity in reducing expression of such cancer-related genes).

[0049] In a separate embodiment, exposure of said cells to be tested to the chemical agent, especially one suspected of having anti-neoplastic activity, may result in upward modulation of said genes of the cell to be tested. Such upward modulation is interpreted as meaning that said genes are expressed where previously not expressed, or else are expressed in greater quantities, or at higher levels, when exposed to the agent as compared to non-exposure to the agent.

[0050] Such upward modulation may be taken as indicative of anti-neoplastic activity by the tested chemical agent(s) of the gene, or genes, so modulated, resulting in lower neoplastic activity on the part of such cells, such as where increased expression of the gene, or genes, results in decreased growth and/or increased differentiation of said cells away from the cancerous state.

[0051] The genes useful in the assay processes include as a part thereof at least one of the sequences selected from the group consisting of the sequences of SEQ ID NO: 1-658, or sequences substantially identical thereto. Such sequences also include sequences complementary to any of the sequences disclosed herein.

[0052] The genes identified by the present disclosure are considered “cancer-related” genes, as this term is used herein, and include genes expressed at higher levels (due, for example, to elevated rates of expression, elevated extent of expression or increased copy number) in cancer cells relative to expression of these genes in normal (i.e., non-cancerous) cells where said cancerous state or status of test cells or tissues has been determined by methods known in the art, such as by reverse transcriptase polymerase chain reaction (RT-PCR) as described in the Example below. In specific embodiments, this relates to the genes whose sequences correspond to the sequences of SEQ ID NO: 1-362 and 601-658. Also specifically contemplated are genes whose expression is higher in normal as opposed to known cancer cells (as determined by other means, such as uncontrolled growth, change in antigenic surface proteins, genetic mutation, and the like) such that the decreased expression in cancer cells may be indicative of, or contributory to, the realization of the cancerous state. In specific embodiments thereof, this relates to the genes whose sequences correspond to the sequences of SEQ ID NO: 363-600 disclosed herein. As used herein, the term “correspond” means that the gene has the indicated nucleotide sequence or that it encodes substantially the same RNA as would be encoded by the indicated sequence, the term “substantially” meaning about at least 90% identical as defined elsewhere herein and includes splice variants thereof.

[0053] The sequences disclosed herein may be genomic in nature and thus represent the sequence of an actual gene, such as a human gene, or may be a cDNA sequence derived from a messenger RNA (mRNA) and thus represent contiguous exonic sequences derived from a corresponding genomic sequence or they may be wholly synthetic in origin for purposes of tecting. As described in the Example, the expression of these cancer-related genes is determined from the relative expression levels of the RNA complement of a cancerous cell relative to a normal (i.e., non-cancerous) cell. Because of the processing that may take place in transforming the initial RNA transcript into the final mRNA, the sequences disclosed herein may represent less than the full genomic sequence.

[0054] They may also represent sequences derived from ribosomal and transfer RNAs.

[0055] Consequently, the genes present in the cell (and representing the genomic sequences) and the sequences disclosed herein, which are mostly cDNA sequences, may be identical or may be such that the cDNAs contain less than the full genomic sequence. Such genes and cDNA sequences are still considered corresponding sequences because they both encode similar RNA sequences. Thus, by way of non-limiting example only, a gene that encodes an RNA transcript, which is then processed into a shorter mRNA, is deemed to encode both such RNAs and therefore encodes an RNA complementary to (using the usual Watson-Crick complementarity rules), or that would otherwise be encoded by, a cDNA (for example, a sequence as disclosed herein). Thus, the sequences disclosed herein correspond to genes contained in the cancerous or normal cells used to determine relative levels of expression because they represent the same sequences or are complementary to RNAs encoded by these genes. Such genes also include different alleles and splice variants that may occur in the cells used in the processes of the invention.

[0056] The genes of the invention “correspond to” a polynucleotide having a sequence of SEQ ID NO: 1-658 if the gene encodes an RNA (processed or unprocessed, including naturally occurring splice variants and alleles) that is at least 90% identical, preferably at least 95% identical, most preferably at least 98% identical to, and especially identical to, an RNA that would be encoded by, or be complementary to, such as by hybridization with, a polynucleotide having the indicated sequence. In addition, genes including sequences at least 90% identical to a sequence selected from SEQ ID NO: 1-658, preferably at least about 95% identical to such a sequence, more preferably at least about 98% identical to such sequence and most preferably comprising such sequence are specifically contemplated by all of the processes of the present invention as being genes that correspond to these sequences. In addition, sequences encoding the same proteins as any of these sequences, regardless of the percent identity of such sequences, are also specifically contemplated by any of the methods of the present invention that rely on any or all of said sequences, regardless of how they are otherwise described or limited. Thus, any such sequences are available for use in carrying out any of the methods disclosed according to the invention. Such sequences also include any open reading frames, as defined herein, present within any of the sequences of SEQ ID NO: 1-658.

[0057] Further in accordance with the present invention, the term “percent identity” or “percent identical,” when referring to a sequence, means that a sequence is compared to a claimed or described sequence after alignment of the sequence to be compared (the “Compared Sequence”) with the described or claimed sequence (the “Reference Sequence”). The Percent Identity is then determined according to the following formula:

Percent Identity=100[1−(C/R)]

[0058] wherein C is the number of differences between the Reference Sequence and the Compared Sequence over the length of alignment between the Reference Sequence and the Compared Sequence wherein (i) each base or amino acid in the Reference Sequence that does not have a corresponding aligned base or amino acid in the Compared Sequence and (ii) each gap in the Reference Sequence and (iii) each aligned base or amino acid in the Reference Sequence that is different from an aligned base or amino acid in the Compared Sequence, constitutes a difference; and R is the number of bases or amino acids in the Reference Sequence over the length of the alignment with the Compared Sequence with any gap created in the Reference Sequence also being counted as a base or amino acid.

[0059] If an alignment exists between the Compared Sequence and the Reference Sequence for which the percent identity as calculated above is about equal to or greater than a specified minimum Percent Identity then the Compared Sequence has the specified minimum percent identity to the Reference Sequence even though alignments may exist in which the hereinabove calculated Percent Identity is less than the specified Percent Identity.

[0060] As used herein, the terms “portion,” “segment,” and “fragment,” when used in relation to polypeptides, refer to a continuous sequence of nucleotide residues, sequence forms a subset of a larger sequence. Such terms include the products produced by treatment of said polynucleotides with any of the common endonucleases, or any stretch of polynucleotides that could be synthetically synthesized. These may include exonic and intronic sequences of the corresponding genes.

[0061] As used herein and except as noted otherwise, all terms are defined as given below.

[0062] In accordance with the present invention, the term “DNA segment” or “DNA sequence” refers to a DNA polymer, in the form of a separate fragment or as a component of a larger DNA construct, which has been derived from DNA isolated at least once in substantially pure form, i.e., free of contaminating endogenous materials and in a quantity or concentration enabling identification, manipulation, and recovery of the segment and its component nucleotide sequences by standard biochemical methods, for example, using a cloning vector. Such segments are provided in the form of an open reading frame uninterrupted by internal nontranslated sequences, or introns, which are typically present in eukaryotic genes. Sequences of non-translated DNA may be present downstream from the open reading frame, where the same do not interfere with manipulation or expression of the coding regions.

[0063] The term “coding region” refers to that portion of a gene which either naturally or normally codes for the expression product of that gene in its natural genomic environment, i.e., the region coding in vivo for the native expression product of the gene. The coding region can be from a normal, mutated or altered gene, or can even be from a DNA sequence, or gene, wholly synthesized in the laboratory using methods well known to those of skill in the art of DNA synthesis.

[0064] In accordance with the present invention, the term “nucleotide sequence” refers to a heteropolymer of deoxyribonucleotides. Generally, DNA segments encoding the proteins provided by this invention are assembled from cDNA fragments and short oligonucleotide linkers, or from a series of oligonucleotides, to provide a synthetic gene which is capable of being expressed in a recombinant transcriptional unit comprising regulatory elements derived from a microbial or viral operon.

[0065] The term “expression product” means that polypeptide or protein that is the natural translation product of the gene and any nucleic acid sequences coding equivalents resulting from genetic code degeneracy and thus coding for the same amino acid(s).

[0066] The term “fragment,” when referring to a coding sequence, means a portion of DNA comprising less than the complete coding region whose expression product retains essentially the same biological function or activity as the expression product of the complete coding region.

[0067] The term “primer” means a short nucleic acid sequence that is paired with one strand of DNA and provides a free 3′-OH end at which a DNA polymerase starts synthesis of a deoxyribonucleotide chain. These include PCR primers.

[0068] The term “promoter” means a region of DNA involved in binding of RNA polymerase to initiate transcription. The term “enhancer” refers to a region of DNA that, when present and active, has the effect of increasing expression of a different DNA sequence that is being expressed, thereby increasing the amount of expression product formed from said different DNA sequence.

[0069] The term “open reading frame (ORF)” means a series of triplets coding for amino acids without any termination codons and is a sequence (potentially) translatable into protein.

[0070] As used herein, reference to a DNA sequence includes both single stranded and double stranded DNA. Thus, the specific sequence, unless the context indicates otherwise, refers to the single strand DNA of such sequence, the duplex of such sequence with its complement (double stranded DNA) and the complement of such sequence.

[0071] In carrying out the assays of the invention, relative antineoplastic activity may be ascertained by the extent to which a given chemical agent modulates the expression of genes present in a cancerous cell. Thus, a first chemical agent that modulates the expression of a gene associated with the cancerous state (i.e., a gene that includes one of the sequences disclosed herein and present in cancerous cells) to a larger degree than a second chemical agent tested by the assays of the invention is thereby deemed to have higher, or more desirable, or more advantageous, anti-neoplastic activity than said second chemical agent. Alternatively, where first and second chemical agents modulate expression of more than one of said genes, but where the second modulates expression of, for example, five said genes, whereas the first modulates expression of only three of said genes, especially where the three form a subset of the five, then the second chemical agent is deemed a more potent anti-neoplastic agent than the first. Such anti-neoplastic activity, as determined using the assays of the present invention, may necessarily include combinations of the foregoing possibilities, which are in no way to be considered limiting.

[0072] In utilizing these gene sequences for the assays according to the invention, the genes whose activity is to be determined with and without the presence of the compound to be evaluated for anti-tumor activity may be any one, or several, or any combination of the gene sequences disclosed herein as SEQ ID NO: 1-658. However, how the gene sequences are employed in such assays depends on the pattern of gene expression disclosed for the signature sets. For example, a sequence that is expressed in cancerous cells but not in normal cells will identify a potential anticancer agent by that agent's ability to decrease expression of the sequence, or sequences, in tumor cells. Conversely, a sequence, or sequences, expressed in normal but not tumor cells will identify a potential antitumor agent by its ability to increase expression of those genes in the tumor cells. The same relationship holds true where the sequences are expressed in both cancer and normal cells but are expressed at a higher level in one than in the other, and vice versa. Based on the expression patterns disclosed for the gene sequences and signature sets disclosed herein, it should be readily apparent to those skilled in the art how to conduct assays for potential antitumor agents using the signature gene sets. The same holds true where the sequences, or signature gene sets, are utilized to determine the cancerous state of a cell or use of an agent to treat a cancerous condition.

[0073] Thus, in one aspect, the present invention relates to a process for screening for an anti-neoplastic agent comprising the steps of (a) exposing cells to a chemical agent to be tested for antineoplastic activity, and (b) determining a change in expression of at least one gene of a signature gene set, or a sequence that is at least 90%, preferably at least 95% identical thereto, wherein a change in expression is indicative of anti-neoplastic activity. Such change in expression is intended to mean a change that includes any activity of the gene, and may be an increase or decrease thereof. In addition, such change in activity may be a change in expression or other activity of at least 1 such gene, such as 5 or 10, or more of the genes of a signature set, even as many as half of such genes or even of all of the genes of a particular gene set.

[0074] The gene expression to be measured is commonly assayed using RNA expression as an indicator. Thus, the greater the level of RNA (such as a messenger RNA) detected the higher the level of expression of the corresponding gene. Thus, gene expression, either absolute or relative, such as where the expression of several different genes are being quantitatively evaluated and compared, for example, where chemical agents modulate the expression of more than one gene, such as a set of 3, 4, 5, or more genes, is determined by the relative expression of the RNAs encoded by such genes.

[0075] RNA may be isolated from samples in a variety of ways, including lysis and denaturation with a phenolic solution containing a chaotropic agent (e.g., triazol) followed by isopropanol precipitation, ethanol wash, and resuspension in aqueous solution; or lysis and denaturation followed by isolation on solid support, such as a Qiagen resin and reconstitution in aqueous solution; or lysis and denaturation in non-phenolic, aqueous solutions followed by enzymatic conversion of RNA to DNA template copies.

[0076] Normally, prior to applying the processes of the invention, steady state RNA expression levels for the genes, and sets of genes, disclosed herein will have been obtained. It is the steady state level of such expression that is affected by potential anti-neoplastic agents as determined herein. Such steady state levels of expression are easily determined by any methods that are sensitive, specific and accurate. Such methods include, but are in no way limited to, real time quantitative polymerase chain reaction (PCR), for example, using a Perkin-Elmer 7700 sequence detection system with gene specific primer probe combinations as designed using any of several commercially available software packages, such as Primer Express software, solid support based hybridization array technology using appropriate internal controls for quantitation, including filter, bead, or microchip based arrays, solid support based hybridization arrays using, for example, chemiluminescent, fluorescent, or electrochemical reaction based detection systems.

[0077] In one embodiment of the present invention, a set of genes useful in evaluating, or screening, or otherwise assaying, one or more chemical agents for anti-neoplastic activity in the assays disclosed herein will have already been shown to have differences in the ratios of steady state RNA levels in cancer cells, or tissues, relative to normal, or non-tumorous cells or tissues, or will have exhibited differences in the expression ratios in tumor samples compared to normal samples between genes in a given subset of the set of genes disclosed herein, or will have gene expression that has increased from undetectable levels to detectable levels, or vice versa, as the case may be, especially where sensitive detection methods are employed, or conversely will have decreased from detectable levels to undetectable levels with such procedures, especially sensitive procedures.

[0078] The genes, and gene sequences, useful in practicing the methods of the present invention are genes that are found to be selectively expressed in, or not expressed in, cancer cells as compared to non-cancer cells, or in which expression is down-regulated or up-regulated, as the case may be, in cancerous cells as compared to non-cancerous cells. Thus, these may include genes, or sets of genes, expressed in cancer cells but absent from, or inactive in, non-cancerous cells, or may include genes, or sets of genes, expressed in non-cancerous cells, but not expressed in cancer cells. Alternatively, the genes useful in practicing the present invention may be more expressed, or less expressed, in a cancerous cell relative to a non-cancerous cell. Such genes are generally those comprising the sequences of SEQ ID NO: 1-658, with SEQ ID NO: 1-362 and 601-658 exhibiting elevated expression in cancer cells relative to normal cells and vice versa for SEQ ID NO: 363-600.

[0079] In accordance with the foregoing, the present invention further relates to a process for determining the cancerous status of a test cell, comprising determining expression in said test cell of at least one gene that corresponds to, or includes, one of the nucleotide sequences selected from the sequences of SEQ ID NO: 1-658, or a nucleotide sequence that is at least 90%, preferably at least 95%, identical thereto, and then comparing said expression to expression of said at least one gene in at least one cell known to be non-cancerous whereby a difference in said expression indicates that said cell is cancerous.

[0080] In a particular embodiment, the present invention is directed to a process for determining the cancerous status of a cell to be tested, comprising determining the presence in said cell of at least one gene that includes one of the nucleotide sequences selected from the sequences of SEQ ID NO: 1-658, including sequences having substantial identity homologous to said sequences, or characteristic fragments thereof, or the complements of any of the foregoing and then comparing the pattern of said gene presence and/or absence with that found for a cell known, or believed, to be non-cancerous, or normal, at least with respect to its genetic complement.

[0081] With respect to genes that correspond to at least one of the sequences of SEQ ID NO: 1-362 and 601-658, up regulation of expression in cancer cells (as compared to non-cancer cells, which may lack said genes, or said gene expression, altogether) is indicative of a cancerous, or potentially cancerous, condition.

[0082] In specific embodiments, the present invention relates to embodiments wherein the genetic pattern is the modulation of expression of more than one gene, preferably 3, 4, or 5 genes, and even includes patterns where there is a modulation of expression of as many as 10, or more, genes. Thus, where a genetic pattern is the modulation of expression of 5 genes in a cancerous cell as compared to a non-cancerous cell from the same tissue type, such as a cancerous prostate cell, versus a non-cancerous cell of prostate, such a pattern indicates a likelihood that such genes (i.e., the modulation of expression of those 5 genes) is an indicator of cancerous status and thereby provides a means of diagnosing a cancerous, or potentially cancerous, status. The absence of a specific set of genes from cancerous cells where said genes are present in otherwise normal cells, especially those of a similar type, is also indicative of a correlation with the cancerous state and thus can likewise be used as a means of diagnosing the cancerous state in other cells suspected of being cancerous.

[0083] In a particular embodiment, the gene sequences as disclosed herein are indicative of the cancerous or normal state of prostate tissues. This further includes SEQ ID NO: 1-658 for prostate, wherein SEQ ID NO: 1-362 represent genes or gene sequences expressed in prostate adenocarcinoma but not appreciably expressed in normal prostate cells, wherein SEQ ID NO: 363-600 represent genes or gene sequences expressed in normal prostate cells but not expressed at appreciable levels in prostate adenocarcinoma and wherein SEQ ID NO: 601-658 represent genes or gene sequences for ribosomal proteins that are highly expressed in prostate adenocarcinoma but are not expressed at appreciable levels in normal prostate cells.

[0084] The gene patterns indicative of a cancerous state need not be characteristic of every cell found to be cancerous. Thus, the methods disclosed herein are useful for detecting the presence of a cancerous condition within a tissue where less than all cells exhibit the complete pattern. For example, a set of selected genes, comprising sequences homologous under stringent conditions (i.e., at least 95% identical) to at least one of the sequences of SEQ ID NO: 1-362 and 601-658 and wherein the signature set is comprised of genes expressed and/or up-regulated in cancer cells relative to normal cells, as disclosed above for the signature gene set (or sets) used for practicing the invention, may be found, using appropriate probes, either DNA or RNA, to be present in as little as 60% of cells derived from a sample of tumorous, or malignant, tissue while being absent from as much as 60% of cells derived from corresponding non-cancerous, or otherwise normal, tissue (and thus being present in as much as 40% of such normal tissue cells). In a preferred embodiment, such gene pattern is found to be present in at least 70% of cells drawn from a cancerous tissue and absent from at least 70% of a corresponding normal, non-cancerous, tissue sample. In an especially preferred embodiment, such gene pattern is found to be present in at least 80% of cells drawn from a cancerous tissue and absent from at least 80% of a corresponding normal, non-cancerous, tissue sample. In a most preferred embodiment, such gene pattern is found to be present in at least 90% of cells drawn from a cancerous tissue and absent from at least 90% of a corresponding normal, non-cancerous, tissue sample. In an additional embodiment, such gene pattern is found to be present in at least 100% of cells drawn from a cancerous tissue and absent from at least 100% of a corresponding normal, non-cancerous, tissue sample, although the latter embodiment may represent a rare occurrence.

[0085] Conversely, where the signature set (such as SEQ ID NO: 363-600) is expressed or up-regulated in normal cells versus cancerous cells (where it may not be expressed at all), as disclosed herein, expression in the normal cells but not in suspected cancerous cells may confirm a cancerous state in a suspected cancerous sample where the cells would show lower than expected expression of genes corresponding to one of these sequences.

[0086] Although the presence or absence of expression of one or more selected gene sequences may be indicative of a cancerous status for a given cell, the mere presence or absence of such a gene pattern may not alone be sufficient to achieve a malignant condition and thus the level of expression of such gene pattern may also be a significant factor in determining the attainment of a cancerous state. While a pattern of gene expression may be present in both cancerous and non-cancerous cells, the relative level of expression, as determined by any of the methods disclosed herein, all of which are well known in the art, may differ between the cancerous versus the non-cancerous cells. Thus, it becomes essential to also determine the level of expression of one or more of said genes as a separate means of diagnosing the presence of a cancerous status for a given cell, groups of cells, or tissues, either in culture or in situ.

[0087] In accordance with the invention disclosed herein, a determination of an anticancer agent using the signature gene sets for prostate described herein is based on patterns of modulation of such genes so that increase or decrease in expression of a gene due to the presence of such a potential agent may or may not be meaningful. Thus, the more genes in a gene set as disclosed herein that are affected by said agent the more likely said agent is an effective therapeutic agent.

[0088] In addition, different agents may have different abilities to affect the genes of a signature gene set. For example, if a potential therapeutic agent, say, agent A, causes a gene or group of genes of a characteristic or signature gene set, or even all of the genes of said gene set, to exhibit decreased expression, such as where a lower amount of mRNA is expressed from said gene(s), or less protein is produced from said mRNA, but a second potential agent, say, agent B, while modulating the activity of the same or related genes causes said expression to be reduced to half, such as where only half as much mRNA is transcribed or only half as much protein is translated from said mRNA as for agent A, then agent B is considered to have twice as much therapeutic potential as agent A.

[0089] Such modulation or change of activity as determined using the assays disclosed herein may include either an increase or a decrease in activity of said genes or gene sequences. Thus, where a gene is expressed in cancer cells but not in normal cells, or is up-regulated in cancer cells relative to normal cells, of the same organ or tissue type, an agent that down-regulates said gene or genes, or gene sequences, or prevents their expression entirely, is considered a potential antitumor agent within the present disclosure. Conversely, where an agent causes expression of a gene or genes, or gene sequences, expressed in normal cells but not in cancer cells, or where said agent up-regulates a gene or genes, or gene sequences, that are expressed in normal cells but not in cancer cells, or are up-regulated in normal cells but not in cancer cells, of the same organ or tissue type, said agent is considered to be a potential antitumor agent within the present disclosure.

[0090] The present invention also relates to a process that comprises a method for producing a product comprising identifying an agent according to one of the disclosed processes for identifying such an agent (such as the therapeutic agents identified according to the assay procedures disclosed herein) wherein said product is the data collected with respect to said agent as a result of said identification process, or assay, and wherein said data is sufficient to convey the chemical character and/or structure and/or properties of said agent. For example, the present invention specifically contemplates a situation whereby a user of an assay of the invention may use the assay to screen for compounds having the desired enzyme modulating activity and, having identified the compound, then conveys that information (i.e., information as to structure, dosage, etc) to another user who then utilizes the information to reproduce the agent and administer it for therapeutic or research purposes according to the invention. For example, the user of the assay (user 1) may screen a number of test compounds without knowing the structure or identity of the compounds (such as where a number of code numbers are used the first user is simply given samples labeled with said code numbers) and, after performing the screening process, using one or more assay processes of the present invention, then imparts to a second user (user 2), verbally or in writing or some equivalent fashion, sufficient information to identify the compounds having a particular modulating activity (for example, the code number with the corresponding results). This transmission of information from user 1 to user 2 is specifically contemplated by the present invention.

[0091] In accordance with the foregoing, the present invention further relates to a process for determining the cancerous status of a cell to be tested, comprising determining the level of expression in said cell of at least one gene that includes one of the nucleotide sequences selected from the sequences of SEQ ID NO: 1 -658, including sequences substantially identical to said sequences, or characteristic fragments thereof, or the complements of any of the foregoing and then comparing said expression to that of a cell known to be non-cancerous whereby the difference in said expression indicates that said cell to be tested is cancerous.

[0092] In specific embodiments of the present invention, said expression is determined for more than one of said genes, such as 2, 3, 4, 5, or more such genes, considered as a set, and even as many as a set of 10 such genes. A set of genes, for example, 5 such genes, may be found to be expressed at certain levels in cancer cells but are found to be expressed at lower levels (or not expressed at all) in non-cancerous, or normal, cells. Conversely, a set of, for example, 5 such genes may be found to be expressed in normal (i.e., non-cancerous) cells but expressed at lower levels (or not expressed at all) in cancer cells. Thus, by determining the set or pattern of genes expressed in cancer cells but expressed at lower levels (or not at all) in non-cancer, or vice versa, a method is achieved for diagnosing cancerous conditions wherein said genes are selected from those that include one of the sequences, or fragments of sequences, including complementary sequences, selected from SEQ ID NO: 1-658. Using the methods disclosed herein, prostate or other cancers can be readily detected using the methods of the present invention.

[0093] In accordance with the invention, although gene expression for a gene that includes as a portion thereof one of the nucleotide sequences of SEQ ID NO: 1-658, is preferably determined by use of a probe that is a fragment of such nucleotide sequence, it is to be understood that the probe may be formed from a different portion of the gene. Thus, for each gene of the signature set of the present invention, the nucleotide sequence disclosed with respect to a specific sequence ID number may be only a portion of the nucleotide sequence that encodes expression of the gene. As a result, expression of the gene may be determined by use of a nucleotide probe that hybridizes to messenger RNA (mRNA) transcribed from a portion of the gene other than the specific nucleotide sequence disclosed with reference to a sequence ID number as recited herein.

[0094] The present invention further relates to a process for determining a cancer initiating, facilitating or suppressing gene comprising the steps of contacting a cell with a cancer modulating agent and determining a change in expression of a gene selected from the group consisting of the gene sequences of SEQ ID NO: 1-658 and thereby identifying said gene as being a cancer initiating or facilitating gene.

[0095] Thus, some or all of the genes within the signature gene sets disclosed herein as SEQ ID NO: 1-658 are found to play a direct role in the initiation or progression of cancer or even other diseases and disease processes. Because changes in expression of these genes (either up-regulation or down-regulation) are linked to the disease state (i.e. cancer), the change in expression may contribute to the initiation or progression of the disease. For example, if a gene that is up-regulated is an oncogene, or if a gene that is down-regulated is a tumor suppressor, such a gene provides for a means of screening for small molecule therapeutics beyond screens based upon expression output alone. For example, genes, that display up-regulation in cancer and whose elevated expression contributes to initiation or progression of disease represent targets in screens for small molecules that inhibit or block their function. Examples include, but are not be limited to, kinase inhibition, cellular proliferation, substrate analogs that block the active site of protein targets, etc. Similarly, genes that display down-regulation in cancer and whose absence results in initiation or progression of disease are valuable therapeutics for gene therapy.

[0096] In accordance therewith, the present invention relates to a process for determining a cancer initiating or facilitating gene comprising contacting a cell expressing a test gene (one whose status as a cancer initiating or facilitating gene is to be determined) with an agent that decreases the expression of a gene corresponding to a polynucleotide having a sequence selected from the group consisting of SEQ ID NO: 1-362 and 601-658, and detecting a decrease in expression of said test gene compared to when said agent is not present, thereby identifying said test gene as being a cancer initiating or facilitating gene. Such genes may, of course, be oncogenes and said decrease in expression may be due to a decrease in copy number of said gene in said cell or a cell derived from said cell, such as where copy number is reduced following cellular replication.

[0097] The present invention also relates to a process for determining a cancer suppressor gene comprising contacting a cell expressing a test gene (one whose status as a cancer suppressor gene is to be determined) with an agent that increases the expression of a gene that encodes an RNA at least 95% identical to an RNA encoded by (i.e., corresponds to) a polynucleotide having a sequence selected from the group consisting of SEQ ID NO: 363-600 and detecting an increase in expression of said test gene compared to when said agent is not present, thereby identifying said test gene as being a cancer suppressor gene.

[0098] The sequence identity may include identical sequences, as defined herein, and such a process includes embodiments wherein the increase in expression is due to an increase in copy number of the gene in said cell or a cell derived from said cell, such as by cellular replication. Such increase in expression may also include the induction of expression in a cell, especially a cancer cell, such as a prostate cancer cell, where such expression is not detectable in the absence of the agent.

[0099] It should be noted that there are a variety of different contexts in which genes have been evaluated as being involved in the cancerous process. Thus, some genes may be oncogenes and encode proteins that are directly involved in the cancerous process and thereby promote the occurrence of cancer in an animal. In addition, other genes may serve to suppress the cancerous state in a given cell or cell type and thereby work against a cancerous condition forming in an animal. Other genes may simply be involved either directly or indirectly in the cancerous process or condition and may serve in an ancillary capacity with respect to the cancerous state. All such types of genes are deemed with those to be determined in accordance with the invention as disclosed herein. Thus, the gene determined by said process of the invention may be an oncogene, or the gene determined by said process may be a cancer facilitating gene, the latter including a gene that directly or indirectly affects the cancerous process, either in the promotion of a cancerous condition or in facilitating the progress of cancerous growth or otherwise modulating the growth of cancer cells, either in vivo or ex vivo. In addition, the gene determined by said process may be a cancer suppressor gene, which gene works either directly or indirectly to suppress the initiation or progress of a cancerous condition. Such genes may work indirectly where their expression alters the activity of some other gene or gene expression product that is itself directly involved in initiating or facilitating the progress of a cancerous condition. For example, a gene that encodes a polypeptide, either wild or mutant in type, which polypeptide acts to suppress of tumor suppressor gene, or its expression product, will thereby act indirectly to promote tumor growth.

[0100] In accordance with the foregoing, the process of the present invention includes cancer modulating agents that are themselves either polypeptides, or small chemical entities, that affect the cancerous process, including initiation, suppression or facilitation of tumor growth, either in vivo or ex viva. Said cancer modulating agent may have the effect of increasing gene expression or said cancer modulating agent may have the effect of decreasing gene expression as such terms have been described herein.

[0101] In keeping with the present disclosure, the present invention also relates to a process for treating cancer comprising contacting a cancerous cell with an agent having activity against an expression product encoded by a gene sequence selected from the group consisting of SEQ ID NO: 1-658. More specifically, the present invention relates to a process for treating cancer comprising contacting a cancerous cell with an agent having activity against an expression product encoded by a gene sequence selected from the group consisting of SEQ ID NO: 1-362 and 601-658. Such a process includes an embodiment wherein the cancerous cell is contacted in viva. Such treatment includes treatment of a patient, such as a human being. The agent may include an antibody that reacts with a polypeptide encoded by such a gene. In a preferred embodiment, said gene encodes a ribosomal protein and corresponds to a sequence selected from SEQ ID NO: 601-658.

[0102] Thus, some or all of the genes within these signature gene sets represent individual targets for therapeutic intervention, based at least in part on their pattern(s) of expression. For example, genes within the signature gene sets that encode cell surface molecules and are up-regulated in cancer as compared to normal cells. The proteins encoded by such genes, due to their elevated expression in cancer cells, represent highly useful therapeutic targets for “targeted therapies” utilizing such affinity structures as, for example, antibodies coupled to some cytotoxic agent. In such methodology, it is advantageous that nothing need be known about the endogenous ligands or binding partners for such cell surface molecules. Rather, an antibody or equivalent molecule that can specifically recognize the cell surface molecule (which could include an artificial peptide, a surrogate ligand, and the like) that is coupled to some agent that can induce cell death or a block in cell cycling offers therapeutic promise against these proteins. Thus, such approaches include the use of so-called suicide “bullets” against intracellular proteins The process of the present invention includes embodiments of the above-recited process wherein said cancer cell is contacted in vivo as well as ex vivo, preferably wherein said agent comprises a portion, or is part of an overall molecular structure, having affinity for said expression product. In one such embodiment, said portion having affinity for said expression product is an antibody, especially where said expression product is a polypeptide or oligopeptide or comprises an oligopeptide portion, or comprises a polypeptide.

[0103] Such an agent can therefore be a single molecular structure, comprising both affinity portion and anti-cancer activity portions, wherein said portions are derived from separate molecules, or molecular structures, possessing such activity when separated and wherein such agent has been formed by combining said portions into one larger molecular structure, such as where said portions are combined into the form of an adduct. Said anti-cancer and affinity portions may be joined covalently, such as in the form of a single polypeptide, or polypeptide-like, structure or may be joined non-covalently, such as by hydrophobic or electrostatic interactions, such structures having been formed by means well known in the chemical arts. Alternatively, the anti-cancer and affinity portions may be formed from separate domains of a single molecule that exhibits, as part of the same chemical structure, more than one activity wherein one of the activities is against cancer cells, or tumor formation or growth, and the other activity is affinity for an expression product produced by expression of genes related to the cancerous process or condition.

[0104] In one embodiment of the present invention, a chemical agent, such as a protein or other polypeptide, is joined to an agent, such as an antibody, having affinity for an expression product of a cancerous cell, such as a polypeptide or protein encoded by a gene related to the cancerous process, especially a gene sequence corresponding to one selected from the group consisting of the sequences of SEQ ID NO: 1-362 and 601-658. In a specific embodiment, said expression product is a cell surface receptor, such as a protein or glycoprotein or lipoprotein, present on the surface of a cancer cell, such as where it is part of the plasma membrane of said cancer cell, and acts as a therapeutic target for the affinity portion of said anticancer agent and where, after binding of the affinity portion of such agent to the expression product, the anti-cancer portion of said agent acts against said expression product so as to neutralize its effects in initiating, facilitating or promoting tumor formation and/or growth. In a separate embodiment of the present invention, binding of the agent to said expression product may, without more, have the effect of deterring cancer promotion, facilitation or growth, especially where the presence of said expression product is related, either intimately or only in an ancillary manner, to the development and growth of a tumor. Thus, where the presence of said expression product is essential to tumor initiation and/or growth, binding of said agent to said expression product will have the effect of negating said tumor promoting activity.

[0105] In one such embodiment, said agent is an apoptosis-inducing agent that induces cell suicide, thereby killing the cancer cell and halting tumor growth. In alternative embodiments of the foregoing, the present invention relates to a process for treating a cancerous condition in an animal afflicted therewith comprising administering to said animal a therapeutically effective amount of an agent first identified as having anti-neoplastic activity using an assay process as disclosed herein according to the present invention, such as a cancer-related gene modulator as identified according to the processes of the invention. Such processes also include the ability to protect against development of a cancerous state by using agents identified by the assay processes of the invention. Thus, the present invention specifically contemplates a process for protecting an animal against cancer comprising administering to an animal at risk of developing cancer a therapeutically effective amount of an agent first identified as having anti-neoplastic activity using one or more of the assay processes disclosed herein for identifying such agents.

[0106] The processes of the present invention take advantage of the correlation of changes in mRNA expression profiles of these signature gene sets with potential (depending on the form of cancer) changes in DNA copy number of the chromosomal regions wherein these genes are located. Of course, the precise nature of the change in mRNA expression (e.g. a signature set of genes that are up-regulated at the transcriptional level) may also indicate a change in the DNA copy number for the genomic regions in which these genes are located (e.g. an amplification of the genomic DNA region that contains the involved gene or genes).

[0107] Many cancers contain chromosomal rearrangements, which typically represent translocations, amplifications, or deletions of specific regions of genomic DNA. A recurrent chromosomal rearrangement that is associated with a specific stage and type of cancer always affects a gene (or possibly genes) that play a direct and critical role in the initiation or progression of the disease. Many of the known oncogenes or tumor suppressor genes that play direct roles in cancer have either been initially identified based upon their positional cloning from a recurrent chromosomal rearrangement or have been demonstrated to fall within a rearrangement subsequent to their cloning by other methods. In all cases, such genes display amplification at both the level of DNA copy number and at the level of transcriptional expression at the mRNA level. At least some of the genes that are contained within signature gene sets disclosed herein (SEQ ID NO: 1-362 and 601-658) display changes in their mRNA expression profiles (depending on the precise reading frame involved) within cancer samples due, in part, to changes in their DNA copy number as a result of specific chromosomal rearrangements in those cancer cells. The utilities that follow from this are (i) that the genes contained within these signature gene sets offer a time saving shortcut to the identification of novel chromosomal rearrangements, amplifications, or deletions that are associated with cancer, and/or (ii) represent key genes affected by such chromosomal rearrangements, amplifications, or deletions and, therefore, play a key role in the initiation or progression of the disease. Genes within the signature sets that identify changes in the DNA copy number (based upon their changes in expression at the mRNA level) afford an entry point into other forms of diagnostic assay for the initiation, staging, or progression of cancer to be conducted in tissue samples at the DNA level (e.g. if gene X identifies a novel chromosomal amplification associated with cancer, then that specific chromosomal region defined by gene X would serve as the basis for a diagnostic assay for cancer, where genomic DNA is extracted from tissue samples and evaluated for the presence of the specific amplification), and also the rapid positional cloning of genes that play vital and direct roles in the initiation or progression of cancer.

[0108] In one embodiment of the present invention, said change in expression may be determined by determining a change in gene copy number, wherein said change in copy number is an increase in copy number or wherein said change in copy number is a decrease in copy number. For example, copy number of a sequence expressed, or over-expressed, in a cancerous cell may be decreased due to the presence of an anti-neoplastic agent as identified according to the assays procedures of the present invention.

[0109] A change in gene copy number may be determined by determining a change in expression of messenger RNA encoded by a particular gene sequence, especially where said sequence is one selected from the group consisting of the sequences of SEQ ID NO: 1-658, especially SEQ ID NO: 1-362 and 601-658 (the latter being expressed in cancer cells but not expressed at appreciable levels in normal cells) and 363-600 (the latter being expressed in normal cells but not at appreciable levels in cancer cells, especially adenocarcinoma). Also in accordance with the present invention, said gene may be a cancer initiating gene, a cancer facilitating gene, or a cancer suppressing gene. In carrying out the methods of the present invention, a cancer facilitating gene is a gene that, while not directly initiating or suppressing tumor formation or growth, said gene acts, such as through the actions of its expression product, to direct, enhance, or otherwise facilitate the progress of the cancerous condition, including where such gene acts against genes, or gene expression products, that would otherwise have the effect of decreasing tumor formation and/or growth.

[0110] The present invention also relates to a process for treating cancer comprising inserting into a cancerous cell a gene construct comprising an anti-cancer gene operably linked to a promoter or enhancer element such that expression of said anti-cancer gene causes suppression of said cancer and wherein said promoter or enhancer element is a promoter or enhancer element modulating a gene, or genes, corresponding to a sequence, or sequences, selected from the group consisting of the sequences of SEQ ID NO: 363-600.

[0111] The signature sets or signature gene sets disclosed herein are useful in identifying genetic regulatory elements within the promoters of the genes contained within the signature sets that are specific to normal tissue and/or the corresponding cancer. Each signature set is a collection of genes that share a gross common pattern of transcriptional regulation in cancer vs. normal (e.g. a signature set of genes that are transcriptionally up-regulated in cancer).

[0112] In one such embodiment, analyzing and comparing the DNA sequences of the promoter regions of all the genes contained within the signature set serves to identify conserved stretches or motifs of sequences within subsets of genes that represent cis-acting elements that specifically drive a form of gene expression (e.g. increased transcriptional expression in cancer). The identification of such cis-acting regulatory elements is then available for use in driving the cancer-specific expression of suicide genes or toxins via genetic therapy using technology already well known in the art.

[0113] In separate embodiments, said anti-cancer gene is a cancer suppressor gene or encodes a polypeptide having anticancer activity, especially where said polypeptide has apoptotic activity.

[0114] In additional embodiments, such insertion of the gene construct into a cancerous cell is accomplished in vivo, for example using a viral or plasmid vector. Such methods can also be applied to in vitro uses. The methods of the present invention are readily applicable to different forms of gene therapy, either where cells are genetically modified ex vivo and then administered to a host or where the gene modification is conducted in vivo using any of a number of suitable methods involving vectors especially suitable to such therapies, such as the use of special viral vectors, including adeno-associated viruses and adenoviruses, as well as retroviruses and specially constructed plasmids to accomplish such therapies. The use of these and other vectors is well known to those skilled in the art and need not be described further.

[0115] The present method also relates to a process for determining functionally related genes comprising contacting one or more gene sequences selected from the group consisting of the sequences of SEQ ID NO: 1-658 with an agent that modulates expression of more than one gene in such group and thereby determining a subset of genes of said group.

[0116] In accordance with the present invention, said functionally related genes are genes modulating the same metabolic pathway or said genes are genes encoding functionally related polypeptides. In one such embodiment, said genes are genes whose expression is modulated by the same transcriptional activator or enhancer sequence, especially where said transcriptional activator or enhancer increases, or otherwise modulates, the activity of a gene sequence selected from the group consisting of SEQ ID NO: 1-658. In specific embodiments, the sequences may be SEQ ID NO: 1-362 and 601-658 or may be SEQ ID NO: 363-600, or subsets of these.

[0117] In one such embodiment, small molecule screens serve to identify changes in expression of genes within a signature set and thereby provide a tool for the identification of specific functional pathways and a means of assigning defined functions to novel genes.

[0118] In situations where a signature set of genes that are transcriptionally up-regulated in cancer cells compared to normal cells, such screens facilitate the identification of small molecules that down-regulate the expression of the genes of the signature set within cancer cells. While such therapeutics make a cancer cell “look” more normal, based upon the expression of the genes within the signature set, what actually happens when such screens are put into practice is that all genes within the signature sets do not respond identically to each small molecule within a chemical compound library. If an average signature set contains 200 different genes, for example, and the expression of all 200 genes is monitored in response to a library of some 50,000 chemical compounds, and subsets of genes within the signature set consistently change their patterns of expression in response to particular chemicals (e.g., 10 of the genes always change expression in a coordinated way, such as down-regulation of one gene within the group of 10) then it always causes the down-regulation of the other 9 specific genes as well.

[0119] Such subsets or subgroups of genes within each signature set that change their expression in a coordinated way in response to chemical compounds represent genes that are located within a common metabolic, signaling, physiological, or functional pathway so that by analyzing and identifying such subsets one can (a) assign known genes and novel genes to specific pathways and (b) identify specific functions and functional roles for novel genes that are grouped into pathways with genes for which their functions are already characterized or described. For example, one might identify a subgroup of 10 genes within a signature set (5 known genes and 5 novel genes) that change expression in a coordinated fashion and for which the 5 known genes are involved in apoptosis thereby implicating the other 5 novel genes as playing a role in apoptotic cellular processes. Therefore, the processes disclosed according to the present invention at once provide a novel means of assigning function to genes, i.e. a novel method of functional genomics, and a means for identifying chemical compounds that have potential therapeutic effects on specific cellular pathways. Such chemical compounds may have therapeutic relevance to a variety of diseases outside of cancer as well, in cases where such diseases are known or are demonstrated to involve the specific cellular pathway that is affected.

[0120] It should be cautioned that, in carrying out the procedures of the present invention as disclosed herein, any reference to particular buffers, media, reagents, cells, culture conditions and the like are not intended to be limiting, but are to be read so as to include all related materials that one of ordinary skill in the art would recognize as being of interest or value in the particular context in which that discussion is presented. For example, it is often possible to substitute one buffer system or culture medium for another and still achieve similar, if not identical, results. Those of skill in the art will have sufficient knowledge of such systems and methodologies so as to be able, without undue experimentation, to make substitutions that will optimally serve their purposes in using the methods and procedures disclosed herein.

[0121] The present invention will now be further described by way of the following non-limiting example but it should be kept clearly in mind that other and different embodiments of the methods disclosed according to the present invention will no doubt suggest themselves to those of skill in the relevant art.

### EXAMPLE

[0122] SW480 cells (or other sells of choice, cancerous or normal, such as prostate cancer cells or cell lines) are grown to a density of 226 cells/cm² in Leibovitz's L-15 medium supplemented with 2 mM L-glutamine (90%) and 10% fetal bovine serum. The cells are collected after treatment with 0.25% trypsin, 0.02% EDTA at 37° C. for 2 to 5 minutes. The trypsinized cells are then diluted with 30 ml growth medium and plated at a density of 50,000 cells per well in a 96 well plate (200 μl/well). The following day, cells are treated with either compound buffer alone, or compound buffer containing a chemical agent to be tested, for 24 hours. The media is then removed, the cells lysed and the RNA recovered using the RNAeasy reagents and protocol obtained from Qiagen. RNA is quantitated and 10 ng of sample in 1 μl are added to 24 μl of Taqman reaction mix containing 1× PCR buffer, RNAsin, reverse transcriptase, nucleoside triphosphates, amplitaq gold, tween 20, glycerol, bovine serum albumin (BSA) and specific PCR primers and probes for a reference gene (18S RNA) and a test gene (Gene X). Reverse transcription is then carried out at 48° C. for 30 minutes. The sample is then applied to a Perkin Elmer 7700 sequence detector and heat denatured for minutes at 95° C. Amplification is performed through 40 cycles using 15 seconds annealing at 60° C. followed by a 60 second extension at 72° C. and 30 second denaturation at 95° C. Data files are then captured and the data analyzed with the appropriate baseline windows and thresholds.

[0123] The quantitative difference between the target and reference genes is then calculated and a relative expression value determined for all of the samples used. This procedure is then repeated for each of the target genes in a given signature, or characteristic, set and the relative expression ratios for each pair of genes is determined (i.e., a ratio of expression is determined for each target gene versus each of the other genes for which expression is measured, where each gene's absolute expression is determined relative to the reference gene for each compound, or chemical agent, to be screened). The samples are then scored and ranked according to the degree of alteration of the expression profile in the treated samples relative to the control. The overall expression of the set of genes relative to the controls, as modulated by one chemical agent relative to another, is also ascertained. Chemical agents having the most effect on a given gene, or set of genes, are considered the most anti-neoplastic.

[0124] In carrying out the methods of the invention, it is to be expected that not all cells of a given sample of suspected cancerous cells will express all, or even most, of these genes but that a substantial expression thereof in a substantial number of such cells is sufficient to warrant a determination of a cancerous, or potentially cancerous, condition. The sequences disclosed herein are represented by SEQ ID NO: 1 to 658 although different genes more or less relevant to different organs and tissues and some may be up-regulated in cancer and not normal cells while others are up-regulated in normal cells but not cancerous cells. The sequences presented herein may be genomic, synthetic or cDNA sequences and may also be represented as RNA sequences. The sequences of the sequence listing herein are mostly cDNA sequences but can be used to locate genomic sequences.

The application's sequence listing, which the Patent Office published only in electronic form, follows.

SEQUENCE LISTING (658 sequences)

SEQ ID NO: 1 - DNA, 386 bp, DNA; Homo sapiens
  misc_feature: n=a,t,g or c
gtgggtggcaccgatcccgggccggccgtgcttcacgggtttgtaggtgatggagaactcgcccaggtagtggccgatcatctctggtttgatctccacctggttgaaggtcttgccgttgtacacgcccaccatgctacccaccatctccggcagatcgatcatgtccctcaggtgcgtcttcaccacctcaggcttctccatgggtggtgcctcctttttggcctttctcaagcgcttgagcangtgagtgttgcttccgccgaagaccacggttcaggcgcctcctctgggcgggcgctgtacagctgcatcagttgctcataggacatgtcgagcagttgggtcgaggtctacgccacggtaggtgaacttgcggaaggtgc

SEQ ID NO: 2 - DNA, 265 bp, Homo sapiens
  misc_feature: n=a,t,g or c
gttgagcachbggtactttattgatggtacatgacaaggtgcggctccctaggccccbccccbcttcavnbggtctacatggcaactgtgaggmggggagattcagtgtggtgggggmctgagtgtggcagggmctccccagmagtgrgggtctcycyactbcctcttgtgctctyscyggggctggtggtccaggggtcttactccttggaggccatktgggccatgavsabccaccacccttkttbctktagccaaatycgtt

SEQ ID NO: 3 - DNA, 384 bp, Homo sapiens
cccagtttttacatttatttaaacagaaaacgtgcacatgagcygcctactcattttcttcacygcgcascyyggcatccgggtyggtgactctgatggccagtygggcagctctttccacgayggctttgcsgttctcggaggaaacattgtgagcgatctcggmcacagtaagatttgtygcacatcagcagcacttccagctccbbgacgktbgccgaccaggaacyyccgsgaagccactccggcagcatgtgctttgttttthcgtcgcttccataaccaatgycgggcatcamgdtccsgcccttgaatcttctacgaacccygtcgtcaatscctccsggtttccgccakttacggttaatttygacatatcggtct

SEQ ID NO: 4 - DNA, 372 bp, Homo sapiens
ctagcccagcggtcctttatttttwhhtttaacacctattaygccatgaattcaycgggaataggttccagcagytcmggbtccttcccaycggttctmacaaagtgtgyttctccgggtggagcaggctggcgctttagttgaacccaggtacctttmtctcccgbttctttmtttttcygatcattttccttcacacgtttcmsgaagytatcycggctcttagagtvyttaacgtgctcaatacgcacattawttctcycsgmaagaatctcgcccttaactygtttgtttacaacaatgccaacagcatgcygggwaacattgtagactcttccagtttycgccatggtaacactcgscggggyattc

SEQ ID NO: 5 - DNA, 255 bp, Homo sapiens
tgtgcacttttattcaacccgtctcaagtcagtgtacaggtaagcccyggbtgcctccacccaytccccgggrgaccaaaagccttcatacatctcacgycsggggacaaaaacsggggamgggggggcacgaaggytcatcattcaaaataaaacaaaataaaaacgtattacgsgcgargattaaaaaaatttcscattacataatttacacgggaggvaatggctatcacctcccccsgcggcsggcttggg

SEQ ID NO: 6 - DNA, 358 bp, Homo sapiens
  misc_feature: n=a,t,g or c
aahvggnttagtttttttttattttttacaaatataccsgagaatcatgcaatvchgccagcattggatgcaatccggggccacaagycygcacacncctttgctacygsgtcctgtaatggcagaacctttcatctcgcctttattgttcactatgmctcctgcattatcttcaaaataaagaaacacgscatcttttctacggtatgactttcgttgtcgatsccactgctggatgtacctttkkkbtgrgctctggtttgsnttnttgactgtgggcatcaccatgtcacccacaccagcagggggragtttkttagccgtccttgatcccttcacggggrtgatatacaggkkt

SEQ ID NO: 7 - DNA, 363 bp, Homo sapiens
ccgcgtctgatcttatttattcgttactcaaaaaatcttatttccgmccggattcagacttagaagtagaagctcgcagagaggaaagtctgcgtctcttcgcaattygttccyggcggttctccttagcctccttcattctctyggccaaaagtttagcatattcygcagcctcttctttattttwmycggtacgstgcttcttcagagcaatacgccgccgtttgtgctgcaggacacgtggrgtaacaagacggtgaatcttgggtgctttggtcctaggtttcttaccttctttatttmcrggctttcttacaacatactggcgggcatcatcttctttagagagattgaaaagttcgc

SEQ ID NO: 8 - DNA, 395 bp, Homo sapiens
  misc_feature: n=a,t,g or c
gctgctccagbcaatgaaagggacactttattgaggctccagggccacggggcctgggmaggaggctgmmcttcaaggaaagaacaaccttatttgaccttbttcttgggacgcaggkttgtttggbgtkaccamacttctwatnnnnnnnnnnnnnnnnacgamnnnnngaaggcgagcatagcacttgcggcagaycatcttgtcgmagtygtmytyctgggcaagctggcggagagaaggctcamtaatgccacctcgcaggcgcaacaccaggtgtmcggbsgactctttctggatgttgtagtctgagagagtgcggccmtccyccavactgtttgaccgcaawtatcagaasgatsctggtmagrgagggwtatcccaccytgtcwaaa

SEQ ID NO: 9 - DNA, 276 bp, Homo sapiens
ctgtcaagctgttctttatttcagggagagggcaggggaggggctcagtctttcttggcagcagctttcctcatggcggccagtacgttgctcagctcctcccgcttcctcttggcgcggatgtgcgtccccacccttttcttgataaatttgagggcccgtttgtccttggagaccttcagtaactccatggcgcgccgctcgtacggggcaaagcacacacctcccgaatcatgtcccgcacgaacttggtgtgtttggtcagacgcccgcggc

SEQ ID NO: 10 - DNA, 355 bp, Homo sapiens
raatgkvagccaaagwtttatttcttmatttcttgcatttgaaatactcttcaatgmcatccttggcctgrgmctccttgccatagtccttaactaytacamaactgaaaccaaccactttasggggtttcccctcyctgycaattttacaaaggcctacccattctcctagtttcttgttgtcatcaaccttawttaggttgwtttggtgttcagcamaaagggcctccaccaacttgacatacataggytcatcacagttggatgmaagcacacaaagatgggcttggcgcttcccaaggctttggcagttcgsgaattccacgtgctaggccatcgtggatgagggcascct

SEQ ID NO: 11 - DNA, 308 bp, Homo sapiens
amcamccsgtcatcaatttattaaaatagttgacttaagcatcyscaatsgtgacttccacctcaacycctggctcaatactgatggaagtaatctgcttaacaatctcagaaggactgtgcaagycaatgagtcgcttgtsaattctcatctggaaacgatcccacgkcttagaaccctcaccacaaggagtttttcttgtagtgattctcaaagtcttggtaggcattcgaacysgtcctttcactttgagattctttycttttbcgcccctytatcaagtcagcacacaccttttccaaggwttt

SEQ ID NO: 12 - DNA, 198 bp, Homo sapiens
  misc_feature: n=a,t,g or c
nnnaanctgatagaaggtcttgctctgtcacccaggctggagtgcagtggtgccagatcatggctcatgacagtctcaacctcccaggctgaagtgatcctcccaccttacctccccatccccccaatccccagtagctagctgggactacaggagtatgctactgtgtccagataattaaaaaaaatttttttcctt

SEQ ID NO: 13 - DNA, 470 bp, Homo sapiens
  misc_feature: n=a,t,g or c
tttttttttttggtatataaactatttattaacagacaaggcctacagacttacttcttcttagacacacccacgatgcggccacggcagcctgtggtcttggtgtgctggcctcggacacgaaggccccagaagtgacgcagccctctacgggcccgaatctttttcagtcgctccaggtcttcacagagcttgttgtccagaccattgggctagggacctgggctatattttccatcctttacatccttctgtctgttcaagaaccagggctgggcatcttgtactagtgtgggattctgcataatgggtgatcacatgtttccacctcatcctcagtgagttctcccgccctcttgggtggagggtcagtgtctgcttttccttcaacaccacatggaggcatatttttcgggcccacaccctttaacgggcagttgattgggcaaagggcnttttttcccggccan

SEQ ID NO: 14 - DNA, 362 bp, Homo sapiens
  misc_feature: n=a,t,g or c
aattttttattttgttctactcggttttattcttattgctcaggcttgagtgcactggcctcttctnngcgnaacctccgcctcttgggttcgggtaatgatggttccacgtcagcggccctccncntcttgggtttgcgtgacggttccacgtcaccgaccctccgcctcttgggttcgggtgatgatggttccacgtcagcggccctccncntcttggggtttgcgtgacggttccacatcaccgaccctccgcctcttggggttcgggtgatgatgggttccacggtcagcggccctccgcctcttggggtttgcgtgacggttccacgtcancgaccctccgcctcttggggttcggg

SEQ ID NO: 15 - DNA, 449 bp, Homo sapiens
tttttttggctctagagggggtagagggggtgctatagggtaaatacgggccctatttcaaagatttttaggggaattaattctaggacgatgggcatgaaactgtggtttgctccacagatttcagagcattgaccgtagtatacccccggtcgtgtagcggtgaaagtggtttggtttagacgtccgggaattgcatctgtttttaagcctaatgtggggacagctcatgagtgcaagggcgtgtggggtgtaattattatacgaatgggggcttcaatcgggagtactactcgattgtcaacgtcaaggagtcgcaggtcgcctggttctaggaataatgggggaagtatgtaggagttgaagattagtccgccgtagtcggtgtactcgtaggttcagtaccattggtgggcaaattgatttgatggaggggggggtctttggac

SEQ ID NO: 16 - DNA, 1361 bp, Homo sapiens
cattcggggacgctctcagctctcgactcactgcccagcttccttcaaaatgtcaactgatctcgaaatcctgtgcaagctcagcttggagggtgctcactctacaccctcaggtgcatatgggtcagtcaaagcctacaccaactttgatgctgagggggatgctttgaacattgaaaggaccatcaggacaaaaggtgtgggtaagttcaccattgtcaacattttgaccaacagcaggaatgctcggagagaggatgttgcctttgcctagcagagaaggaccacaaaggaacttacatcagcactgaagtcagccttactggccacctggagacagtcattttgggcctattgaagacacctgctcagtatgatgcttctgagctaaaagcttccatgaaggggctgggaactgaggaggactccctcgttgagatcatctgctcaacaaccaaccaggagctccaggaaattaacagagtctacaaagaaatgtacaaaactgatctggagaaggacattatttcggacacatatggtgacttctgcaagctgatgtttgccctggcaaatgttagaagaccagaggatggctctgtcgttgattatgaactgattgaccaagatgcccgggatttctgtgatgctggagtgaagaggaaaagaactgatgttcccaagtggatcagcatgatgaccgagtagagcatgtcccacctccagaaagtatttgataggtacaagagctacagcccttatgacatgttggaaagcatcaagaaagaggttaaaggagacctggaaaatgctttcctgaacctggtccagtgcattcagaacaagcccctgtattttgctgattggctgtactactccatgaagggccagggggctcgagataaggtcctgatcagaatcatcgtctcccgcagtgaagtggacatgttgaaaattaggtctgaattcaagagaaagtatggcatgtccctgtactactatatccagcaagacactaagaacgactaccagaaagcactgctgtacctgtgtggtggagatgactgaagcccaacatagcttgagcttccagaaacggtgctccccacgcttccagctaacaggtctagaaaaccagcttgtggctaacagtccctgtggccgtccctgtgaagatgacattagcattgcccccaacctcattttagttgcgtaagcatagcctggctttcctgtctagtctctcctgtaagccaaagaaatgtacattccaagcagttggaagtgaaatctatgatgtgaaacactttgcctcctgtgtactgtgtcataaacagatgaataaactgaatttgtacttt

SEQ ID NO: 17 - DNA, 425 bp, Homo sapiens
  misc_feature: n=a,t,g or c
cagctaaaacagcggaagaggngatttattatatggntgttacactcggccacaaataaacacagaaatagnccagaatgtcacaggnccagggcagaggaccaacatgggcattttgtttatgagcaaggtgggtctcagaggtgancggcgatcagagggcgatgaagttctaganccnttgagacaagctctagacagtagcatgcagtcccacaacttgtaccagcatccccagcgtctgggcattccatgtttctgctcctgtgggcctccacgggtgcaacaaggctaggcgggtttacttgggncctctgcctcatctttcttcttttgcgcttcagcctgcgcattcgnttcttcctccattgggnttctcngggcgcagaggtttccaaaaaaaagantcgtggccgaatttttgg

SEQ ID NO: 18 - DNA, 326 bp, Homo sapiens
  misc_feature: n=a,t,g or c
ttttttttttttttttggtggttgctttgaactttatttcgagaaaaacagaagataaatgtatcaaaagaacacacaggtngcgggggaggcgcacagtnggcngcacttngcggtgggcatccgggctaaggctttacttggcggcagtctcatcggattttgcagcttctgggcccccaagctgggcccgcgactcgaaggtgactgggatggtnatctcgttggactgcgtggctaagcttgggcatgggggcctccacggtcagtntgccctcaggggacagggaggaggaaacttgggttggggtccanaccggggggca

SEQ ID NO: 19 - DNA, 265 bp, Homo sapiens
tttttgtgagcaacagagatagtctttattcaaacgcagagagatccataacatggaaacactgacgcttccgaaaccgccccatttattcacttctcaagtggcccccgcttggatgcgccctcgggagagtgggctcagcacagcctagagcaccaggtctgaggtatctgcaaccacgtgggagccaggcccctggacgatgaaggacaatctcctggagcagcaataacttataaggagacataatttagagtagctggag

SEQ ID NO: 20 - DNA, 420 bp, Homo sapiens
  misc_feature: n=a,t,g or c
ttgaccngatgagaaatcagcttgggtacagcccatgccngcagccctttcagtgggtggctccngatagtgttgtccnttcagttgctgggagcggtgaggcccagccctttccccttcctcccaccactattcctaacctggggcctggcaggggtggagtgatgtgatctaagggtcccngggngaagggtggagtggaagaggcagggtnttgggttaaagggaagattctgaggtctcagggcaaaggaaaaggtttttggatgaagactnaggcagtgctacctccctccacatntgaggntcaagcaggtttggncaagaacagagccctgcctggggctcttctnggccncagcctcaggagccaggggtttaaggccanagattaaattgaagttttnagcctttgataaa

SEQ ID NO: 21 - DNA, 282 bp, Homo sapiens
ttttttttttttttttttttttttttttccttttagaaaagcaggtttattggtcgggctgctcaccaggacacagcaacgtgagaggttccccaagcccacagaaaactgcatctgcccacagctcaggccccttcaggccatcagcaccaagggaccttgtccacaatccccaacctccctcggcagagggttcttcagccattcagaggagagaagagaaccgagaaagggaaaaggaagaaaaaaaaaaaaagcaaagctttgtattgtataaaaggt

SEQ ID NO: 22 - DNA, 290 bp, Homo sapiens
  misc_feature: n=a,t,g or c
aggntttattttggaccaaaaaaaaaaccacaattgttttctagctggaagantgggcaaggggggtcccagacagtaaactcccccacgggtgggttgagcctcaggtggggggtctcctgttgtctgtgcttccccacacagcagcctccctcctggngtctgtggcagccacgggaggggcagactaggaggagctgccacagttnttcacttgggcaggaagtcagaggactcagacaccagcttcccatcgcgggtntcgatcttcttnanaaccacggccctgg

SEQ ID NO: 23 - DNA, 341 bp, Homo sapiens
  misc_feature: n=a,t,g or c
hccsgkacaaatttntttattygamggaayggtacaaatcaaagaacttaagcvgatgtttcvgtacaacttatagaaamrgtaaaggaaaccccaacatgcatgcactgcctcngtgaccagggaagtcaccccacggctayggggaaattagcccgcrgcttagctttcattatcactgtctcccmgggtgtgcttgtcaaagagatattccgccaagccagattcgggcgctcccatcthgcgcaagtttgtcacgcggtcacccaattctttgayggctttcacctgctcattcmggtaatgtgtctcaatgamgtcacacaaacsgggktcatttt

SEQ ID NO: 24 - DNA, 482 bp, Homo sapiens
tttttgctttttaaattgctttattagctttaaatttttccatgcaaatgggtgaaactactgctgacagaaacttacactgagtgcaaaggcaatcttcaaatagaagctggcaacacaagacccacttgacacatggaaataacatagggttcacagcaaacggatcagtaaaggcatattaggaaaatgcaaggaaaaagaaaacagcgggaatcacagtattaatctcatgataaatggcaggagtcaaggcataaggcaaaattcatcatgatggtcatggtgattagagagctcccccataaggatacgcagacaattcctcaactgcagctccctaagttttcttctgatttctctcatctcctccatgaatatttccatatcatctccatctccacccatcccatcattgatctgcctattgggtatgggccatcgaaaattaggggcaagtcggcgagcctggtccccgtcgg

SEQ ID NO: 25 - DNA, 511 bp, Homo sapiens
ttaggtatataaactatttattaacagacaaggcctacagacttatttcttcttggacacacccacggtgcggccacggcggccagtggtcttggtgtgctggcctcggacacgaaggccccagaagtgacgcagccctctatgggccgaatcttcttcagtcgctccaggtcttcacggagcttgttgtccagaccattggctaggacctggctgtattttccatcctttacatccttctgtctgttcaagaaccagtctgggatcttgtactggcgtggattctgcataatggtgatcacacgttccacctcatcctcagtgagttctcccgccctcttggtgaggtcaatgtctgctttcctcaacaccacatgagcatatcttcggcccacacccttaatggcagtgatggcaaaggctattttccgccgcccatcgatgttggtgttgagtactcgcaaaatatgctggaacttttcagggatcactagagacatggctgcagcag

SEQ ID NO: 26 - DNA, 238 bp, Homo sapiens
  misc_feature: n=a,t,g or c
cccctccccagagtattaacgctccaagagtattattaacgctgctgtacctcgntctgaatctgccggggccccagcccactccaccctgccagcagcttccagccagtccccacagcctcatcagctctcttcaccgttttttgatactatcttcccccacccccagctacccataggggctgcagagttataagccccaaacaggtcatgctccaataaaaatgattctacctac

SEQ ID NO: 27 - DNA, 380 bp, Homo sapiens
aaaacaagcaaattttattaaaggrraaattttgcaggtttaaggtttgcaggtgaaattttgtmsssgaaaaggtttacttttcaccagtctgthctggcatgcttctaatgatgtcagagtcacctggrtcaatgatagccagtgtgcacactctgtagtattttccgcatgctgtgcccagttcaatattattgccactgtagtgatggacaccagttttagccaacatagcatagtactctatttcagatttcctcaaagctgggcagttgttagcgagaatgmccaatttcgctttgccttgtctgatcatcttcagagtctkcttgtacccrgggcgtactycccacttttcatarcgggtggggcctagagtt

SEQ ID NO: 28 - DNA, 477 bp, Homo sapiens
  misc_feature: n=a,t,g or c
gaggaattaacagtctttattgggctcagaccaggagtccgtgggtcttgaggacctctgtgtatttgtcaattttcttctccacgttcttctcggcctgtttccgtagcctcatgagctgtttcttcttccggtagtggatcttggctttctctttcctcttctcctccaaggtggctgtcaactggcctggtacttcccacccaaccttcggtgaagccaggcgccccaagataagggaaaacttttctttggtagggcttcaaaacgcaccgacccttgaaggggcaagcaggnaaccaacaatccggcttttttccttggtccgtaagggccggtttggaatgccggtnaaaaaaacctttgaagaacnggtcccanaagcgggccttgggcctccgcttnggggtttttgttgggggcancaataacctcggaagggttcngccaaaaaaaaatncgggcttggggggccct

SEQ ID NO: 29 - DNA, 506 bp, Homo sapiens
tttttttttttttttttctctttgataatactgtttattgtccacggaccgagcgattgctcaagaatgatacaaagcatcagagacatgcgcagtctgcttgtcaactttcaacaactcttgtgtgttcccagcaccggaaggtctcagacttcatattccagcataaacacagtgctcccctcccccaaaaatccaaacggaaacaaaatcaacagagctttaaattacggcagcaagtccaatatttcttaatacttatcaagcaaagatttgaaaataactacaatgtaaactttattttaaatattttgagttgcttgcaggatgaaaataggagaagagagctgtgcttagaacataacatataaattaaacgatgccaaatggagagccttcttaaactatatatatattgccactatttattgtgaaggtatttgagcggcttcctctgtcagctgccacccggtcttcttaacctgttttgtttctgccctcgtgcc

SEQ ID NO: 30 - DNA, 431 bp, Homo sapiens
  misc_feature: n=a,t,g or c
acttccaagatnaacatttttctgtttattcttagaatgtgaattttttttttcaactcagggccaagtacaaacttttgatttttgaaattttttcaactcagggccaagtacaatcttttgatttaaaaattttttttcatgaacaaaccatcagtagttattaaggagcccaagaaataggagatgtgaaagcaggatttctttgtgtttcctttgaatgttgttattttgagtattatcattatcagggtaggagggaaggaaagggtagggctggggaaggtagggtccttatggatatcttgactatgggatccccaggatttacatttcacctggtcacagnggcacacataatttaggataaacatgttcaaggaatggacataaacagaggggtaaacacaggggggctttacatttggggg

SEQ ID NO: 31 - DNA, 145 bp, Homo sapiens
  misc_feature: n=a,t,g or c
tttnaagaaaaacnctagcacatttattgggagagtaagcctgggaaagactaagggagtggtggcagggagaaaggctgtggggantcagagcgggtnctcagttgggtcttgaaggagaagaggaggagggtgggaggtgggt

SEQ ID NO: 32 - DNA, 372 bp, Homo sapiens
agtcccagcgaacccgcgtgcaacctgtcccgactctagccgcctcttcagcacgccatggatcccaactgctcctgcgccgccggtgactcctgcacctgcgccggttcctgcaaatgcaaagagtgcaaatgcacttcgtgcaagaaaagctgctgctcctgctgccctgtgggctgtgccaagtgtgcccaaggctgcatctgcaaaggggcgtcggacaagtgcagctgctgcgcctgatgctgggacagccccgctcccagatgtaaagaacgcgacttccacaaacctggattttttatgtacaaccctgaccgtgaccgtttgctatattcctttttctatgaaataatgtgaatgataataaaa

SEQ ID NO: 33 - DNA, 385 bp, Homo sapiens
  misc_feature: n=a,t,g or c
cagctcacaagacagttttattgaattagttgcatgcagganaattctgttcttccatgagcagcagagtcgagtgttagagtgcaggnccagagcggggagaggctggnggagttggggnctggagntggggctggttacttggtgacgtgcagantctctctggggggctgcagctcatcttggggggagctggactcagatgcccccgtangtgcaaaagcaacatccacatctcactcctcccggtgctttttgcggtattcctgcagcgtttctccgccacggtctccataaatttagggttcttcctgggagacttctacagggaccgtcacagtgatgggatcagagtcaaagagcttcacgaccacctcagtgacac

SEQ ID NO: 34 - DNA, 291 bp, Homo sapiens
  misc_feature: n=a,t,g or c
tttttttttttttttttttttttttttttttttggaacctcgggccacacagctcaggcacacaccatcggggctactggctgcttggagtttattttccgcttggtgccaggtgcacagttccaggtgtcaggaaagctagcgagtgctggggccgggcggtagagagcggggctctcactggtttttggtgtctgctgtgttgatgcgaaggtctgcttgctgcagccgcctagtttacagggtggggggtgggaggtggggaggggggcgagggatgcggagtgggga

SEQ ID NO: 35 - DNA, 405 bp, Homo sapiens
  misc_feature: n=a,t,g or c
caaacaacctgtttatttgggcttatgatttactaactgcaggtctatgtgcaggaaggccagcatcccctcctgccgttgtcacccacatccacagagcagccctagtgccaggtgcagccactgccacccacggcacacgggaacaggacccatgctgcaggcctgctctcctgcccagggagatgccacgtgtgtctgtccggcagcttcatgacacagttaccaagcagctagggagggcttagatttgttggtgtccccaaggcctctccctcgggggcttgggcgcatccccanagcccccaagggatgggggctctcgcacgggggcccaattccacagctccacggctggcgcccctcccgtgcccatgggggagaagccaatttatttccagaggn

SEQ ID NO: 36 - DNA, 358 bp, Homo sapiens
  misc_feature: n=a,t,g or c
actgcctgtataatcccctctttattcaaacgmcgctgtccaaaaygatttgacctttmcggaataatcaaatttamgmgtttatgcagcmsgcttcttctcctcygtagtmggtttcttctctgcmggcttcttttcccgggctggtttctcggtagctgctgcctttwttcccaccmgcggcttcttctgcttcttaacaccaacagcagccttctttcctttcttacctaccaccsgcttctygcctraaaccgccgccttctcatctgattycggcttgwagtgccgctgctgaagmastgccttatccacccggrgcttgtgattcccggcctggcgaagaatggtgttccgg

SEQ ID NO: 37 - DNA, 4695 bp, Homo sapiens
  misc_feature: n=a,t,g or c
cccgggctgggctgagacccgcagaggaagacgctctagggatttgtcccggactagcgagatggcaaggctgaggacgggaggctgattgagaggcgaaggtacaccctaatctcaatacaacctttggagctaagccagcaatggtagagggaagattctgcacgtcccttccaggcggcctccccgtcaccaccccccccaacccgccccgaccggagctgagagtaattcatacaaaaggactcgcccctgccttggggaatcccagggaccgtcgttaaactcccactaacgtagaacccagagatcgctgcgttcccgccccctcacccgcccgctctcgtcatcactgaggtggagaagagcatgcgtgaggctccggtgcccgtcagtgggcagagcgcacatcgcccacagtccccgagaagttggggggaggggtcggcaattgaaccggtgcctagagaaggtggcgcggggtaaactgggaaagtgatgtcgtgtactggctccgcctttttcccgagggtgggggagaaccgtatataagtgcagtagtcgccgtgaacgttctttttcgcaacgggtttgccgccagaacacaggtaagtgccgtgtgtggttcccgcgggcctggcctctttacgggttatggcccttgcgtgccttgaattacttccacgcccctggctgcagtacgtgattcttgatcccgagcttcgggttggaagtgggtgggagagttcgaggccttgcgcttaaggagccccttcgcctcgtgcttgagttgaggcctggcctgggcgctggggccgccgcgtgcgaatctggtggcaccttcgcgcctgtctcgctgctttcgataagtctctagccatttaaaatttttgatgacctgctgcgacgctttttttctggcaagatagtcttgtaaatgcgggccaagatctgcacactggtatttcggtttttggggccgcgggcggcgacggggcccgtgcgtcccagcgcacatgttcggcgaggcggggcctgcgagcgcggccaccgagaatcggacgggggtagtctcaagctggccggcctgctctggtgcctggcctcgcgccgccgtgtatcgccccgccctgggcggcaaggctggcccggtcggcaccagttgcgtgagcggaaagatggccgcttcccggccctgctgcagggagctcaaaatggaggacgcggcgctcgggagagcgggcgggtgagtcacccacacaaaggaaaagggcctttccgtcctcagccgtcgcttcatgtgactccacggagtaccgggcgccgtccaggcacctcgattagttctcgagcttttggagtacgtcgtctttaggttggggggaggggttttatgcgatggagtttccccacactgagtgggtggagactgaagttaggccagcttggcacttgatgtaattctccttggaatttgccctttttgagtttggatcttggttcattctcaagcctcagacagtggttcaaagtttttttcttccatttcaggtgtcgtgaaaactacccctaaaagccaaaatgggaaaggaaaagactcatatcaacattgtcgtcattggacacgtagattcgggcaagtccaccactactggccatctgatctataaatgcggtggcatcgacaaaagaaccattgaaaaatttgagaaggaggctgctgaggtatgtttaataccagaaagggaaagatcaactaaaatgagttttaccagcagaatcattaggtgatttccccagaactagtgagtggtttagatctgaatgctaatagttaagaccttacttatgaaataattttgcttttggtgacttctgtaatcgtattgctagtgagtagatttggatgttaatagttaagatcctacttataaaagtttgatttttggttgcttctgtaacccaaagtgaccaaaatcactttggacttggagttgtaaagtggaaactgccaattaagggctggggacaaggaaattgaagctggagtttgtgttttagtaaccaagtaacgactcttaatccttacagatgggaaagggctccttcaagtatgcctgggtcttggataaactgaaagctgagcgtgaacgtggtatcaccattgatatctccttgtggaaatttgagaccagcaagtactatgtgactatcattgatgccccaggacacagagactttatcaaaaacatgattacagggacatctcaggttgggattaataattctaggtttctttatcccaaaaggcttgctttgtacactggttttgtcatttggagagttgacagggatatgtctttgctttctttaaaggctgactgtgctgtcctgattgttgctgctggtgttggtgaatttgaagctggtatctccaagaatgggcagacccgagagcatgcccttctggcttacacactgggtgtgaaacaactaattgtcggtgttaacaaaatggattccactgagccaccctacagccagaagagatatgaggaaattgttaaggaagtcagcacttacattaagaaaattggctacaaccccgacacagtagcatttgtgccaatttctggttggaatggtgacaacatgctggagccaagtgctaacgtaagtggctttcaagaccattgttaaaaagctctgggaatggcgatttcatgcttacacaaattggcatgcttgtgtttcagatgccttggttcaagggatggaaagtcacccgtaaggatggcaatgccagtggaaccacgctgcttgaggctctggactgcatcctaccaccaactcgtccaactgacaagcccttgcgcctgcctctccaggatgtctacaaaattggtggtaagttggctgtaaacaaagttgaatttgagttgatagagtactgtctgccttcataggtatttagtatgctgtaaatatttttaggtattggtactgttcctgttggccgagtggagactggtgttctcaaacccggtatggtggtcacctttgctccagtcaacgttacaacggaagtaaaatctgtcgaaatgcaccatgaagctttgagtgaagctcttcctggggacaatgtgggcttcaatgtcaagaatgtgtctgtcaaggatgttcgtcgtggcaacgttgctggtgacagcaaaaatgacccaccaatggaagcagctggcttcactgctcaggtaacaatttaaagtaacattaacttattgcagaggctaaagtcatttgagactttggatttgcactgaatgcaaatcttttttccaaggtgattatcctgaaccatccaggccaaataagcgccggctatgcccctgtattggattgccacacggctcacattgcatgcaagtttgctgagctgaaggaaaagattgatcgccgttctggtaaaaagctggaagatggccctaaattcttgaagtctggtgatgctgccattgttgatatggttcctggcaagcccatgtgtgttgagagcttctcagactatccacctttgggtaaggatgactacttaaatgtaaaaaagttgtgttaaagatgaaaaatacaactgaacagtactttgggtaataattaactttttttttaataggtcgctttgctgttcgtgatatgagacagacagttgcggtgggtgtcatcaaagcagtggacaagaaggctgctggagctggcaaggtcaccaagtctgcccagaaagctcagaaggctaaatgaatattatccctaatacctgccaccccactcttaatcagtggtggaagaacggtctcagaactgtttgtttcaattggccatttaagtttagtagtaaaagactggttaatgataacaatgcatcgtaaaaccttcagaaggaaaggagaatgttttgtggaccactttggttttcttttttgcgtgtggcagttttaagttattagtttttaaaatcagtactttttaatggaaacaacttgaccaaaaatttgtcacagaattttgagacccattaaaaaagttaaatgagaaacctgtgtgttcctttggtcaacaccgagacatttaggtgaaagacatctaattctggttttacgaatctggaaacttcttgaaaatgtaattcttgagttaacacttctgggtggagaatagggttgttttccccccacataattggaaggggaaggaatatcatttaaagctatgggagggtttctttgattacaacactggagagaaatgcagcatgttgctgattgcctgtcactaaaacaggccaaaaactgagtccttgggttgcatagaaagcttcatgttgctaaaccaatgttaagtgaatctttggaaacaaaatgtttccaaattactgggatgtgcatgttgaaacgtgggttaaaatgactgggcagtgaaagttgactatttgccatgacataagaaataagtgtagtggctagtgtacaccctatgagtggaagggtccattttgaagtcagtggagtaagctttatgccattttgatggtttcacaagttctattgagtgctattcagaataggaacaaggttctaatagaaaaagatggcaatttgaagtagctataaaattagactaattacattgcttttctccgac

SEQ ID NO: 38 - DNA, 281 bp, Homo sapiens
  misc_feature: n=a,t,g or c
gggggagtanggattttattcaggggtggggacaggcgggcggctcagtagcaggtgccgtccacctccgccatgacaacagacacattgacatgggtgggtttacccgccaagcgtcgaatggtnttctgtgtgaaggccagcgnagggcctcgtggcanccatgcaggagaaggtntcccccttnttccagtcctcggntgccacgcgcagtatgntggtcacaggaaggtgggtgggtgccctggctgggnttcctgccgggatgcccaagttcaggt

SEQ ID NO: 39 - DNA, 297 bp, Homo sapiens
  misc_feature: n=a,t,g or c
cggttcagtctaatcctttttgtagtcactcataggccagacttagggctaggatgatgattaataagagggatgacataactattagtggcaggttagttgtttgtagggctcatggtaggggtaaaaggagggcaatttctagatcaaataataagaaggtaatagctactaagaagaattttatggagaaagggacgcgggcgcgcgatatagggtcgaagccgcactcgtaaggggctggaatttttctatgtangccgttgagttngtggtagtcaaaactgtaataactta

SEQ ID NO: 40 - DNA, 374 bp, Homo sapiens
aataaagacatgggtactttattttcaaaacactcatatgttgcaaaaaacacatagaaaaataaagtttggtgggggtgctgactaaacttcaagtcacagacttttatgtgacagattggagcagggtttgttatgcatgtagagaacccaaactaatttattaaacaggatagaaacaggctgtctgggtgaaatggttctgagaaccatccaattcacctgtcagatgctgatagactagctcttcagatgtttttctaccagttcagagatgggttaatgactagttccaatggggaaaaagcaagatggattcacaaaccaagtaattttaaacaaagacactttttttttttttgcaacacaatata

SEQ ID NO: 41 - DNA, 494 bp, Homo sapiens
tttttttttttttttttttatgtgttgtcgtgcaggtagaggcttactagaagtgtgaaaacgtaggcttggattaaggcgacacgagtttctaggatagtcagtagaattagaattgtgaagatgataagtgtagagggaaggttaatggttgatattgctagggtggcgcttccaattaggtgcatgagtaggtggcctgcagtaatgttagcggttaggcgtacggctagggctattggttgaatgagtaggctgatggtttcgataataactagtatggggataaggggtgtaggtgtgccttgtggtaagaagtgggctagggcatttttaatcttagagcgaaagctcataatcactgcgcccgctcataaggggatggcccaggctaggtttatagataattgggtggttggtgtaaatgagttaagcaggagtcccaggaggttagttgtggcaattaaaatgattaaagatactagtataagaga

SEQ ID NO: 42 - DNA, 656 bp, Homo sapiens
tttttttttttttttttttctttttaggtttgagggggaatgctggagattgtaatgggtatggagacatatcatataagtaatgctagggtgagtggtaggaagttttttcataggaggtgtatgagttggtcgtagcggaatcgggggtatgctgttcgaattcataagaacagggaggttagaagtagggtcttggtgacaaaatatgttgtgtagagttcaggggagagtgcgtcatatgttgttcctaggaagattgtagtggtgagggtgtttattataataatgtttgtgtattcggctatgaagaatagggcgaaggggcctgcggcgtattcgatgttgaagcctgagactagttcggactccccttcggcaaaagtcaagggggttccggtttgggccctgctaattgtggagaataatcctatttatggcccaagggtcctatgggcaaggggtaatcaaaggggttcctggggtgggaataagggtgaaaagtttaagggggcccctattaagaattgtgtaaattgaatgtaagccaaggggacctcctaaggaattgttttggccaaacgtccccatggcccgattaagggccaatttaagttttaagctcaacctgattcgaaggtttggtaaacggcaag

SEQ ID NO: 43 - DNA, 127 bp, Homo sapiens
ttttttttttttatagaaaaaatatacactttattttcaactagaaaggtgcaaacatgtgaacttttggtacacactcctccaaacaaattaaaactgtcccgcaaaaaagcaggtcataattcaa

SEQ ID NO: 44 - DNA, 368 bp, Homo sapiens
  misc_feature: n=a,t,g or c
caagggctggaattnaaattattgtcacagagcacaggagagaccgcttgggtctcaatgaaggtttgcttttcctcttctccaggggaagctactgcaagaaggcccaccagccaggctaggtcaaatggggttggggccacaacatgatagttaaacccataaacacagacttgattcgntcccagcttcacgacttcttagctgtgtgaccttaggtaagtctgttaacctctctcagccttggctttgtggagtggagtgaagagcagggcctgcttcactggggtnttatcaggatggagggggacaaggcctntgaaagtntttagcacagcgcctgggcagatcgtgaccagtcacggagt

SEQ ID NO: 45 - DNA, 5471 bp, Homo sapiens
caggacacgaggaaactgttaatgacttgggctttggaagtagctgttgtaatgaagaagtccgaaacatatgcacctttattctgtcttccgtctttccataaattttgcaaaggccttttagccgacactctcgttgaagatgtgaatatctgtctgcaggcatgcagcagtctacatgctctatcctcttccttgccagatgatcttttacagagatgtgttgatgtttgccgtgtccaactagtgcaccgtggaacttgtattcgacaagcatttggaaaactgttgaaatcaattcctttaggtgttttcctaagcgataacaatcacacagaaattcaagaaatttctttagcattaagaagtcacatgagtaaagcaccaagtaatacattccacccccaagatttctctgatgttattagttttattttgtatgggaactctcatagaacagggaaggacaattggttggaaagactgttctatagctgccagagactggataagcgtgaccagtcaacaattccacgcaatctcctgaagacagatgctatcctttggcagtgggccatatgggaagctgcacaattcactgttctttctaagctgagaaccccactgggcagagctcaagacaccttccagacaattgaaggtatcattcgaagtctcgcaggtcacacattaaaccctgatcaggatgttagtcagtggacaactgcagacagtgatgaaggccatggtaacaaccaacttagacttgttcttcttctgcagtatctggaaaatctggagaaattaatgtataatgcatacgagggatgtgctaatgccttaacttcacctcccaaggtcattagaacttttttgtataccaatcgccaaacttgtcaggactggctaacgcggattcgactctccatcatgagggtaggattgttggcaggccagcctgcagtgacagtgagacatggctttgacttgcttacagagatgaaaacaaccagcctatctcaggggaatgaattggaagtaagcattatgatggtggtagaagcactatgtgaacttcattgtcctgaagctatacagggaattgctgtctggtcatcatctattgttggaaaacatcttctgtggattaactcagtggctcaacaggctgaagggaggtttgaaaaggcctctgtggagtaccaggaacacctgtgtgccatgacaggtgttgattgctgcatctccagctttgacaaatcggtgctcaccttagccagtgctgggtgtaagagtgccagcctgaaacattgtctgaatggtgaatccagaaaaagtgtgctgtccaaaccgactgactcttcccctgaggttataaattatttaggaaacaaagcatgtgagtgctacatctcaactgccgattgggctgctgtgcaggaatggcagaacgctatccatgacttgaaaaagagtaccagtagcacttccctcaacctgaaagctgacttcaactatataaaatcattaagcagctttgagtctggaaaatttgtcgaatgtaccgagcaattagaattgttaccaggagaaaatatcaatctacttgctggaggatcaaaagaaaaaatagacatgaaaaaactgcttcgtaacatgtgaagtccagatccaagggaacctcagaaatccattgaagttccattgttaagaagttctgtttgtttggcaactgctttaaacccgatagaacaagatcagaagtggcagtctataactgaaaatgtggtaaagtacttgaagcaaacatcccgcatcgctattggacctctgagactttctactttaacagtttcacagtctttgccagttctaagtaccttgcagctgtattgctcgtctgctttggagaccacagtttctaacagactttcaacagaggactgtcttattccactcttcggcgaagctttacgttcatgtaaacagcatgacgtgaggccgtggatgcaggcattaaggtatactgtgtaccagaatcagttgttggagaaaattaaaggtatgatctcgtgaaatcttgagagaaactgaatgacgaatgaaactattgttcctgtttcacacagaagaaaactgaggttggcactcatcatgagcccctgttctcattctgcaaatggtgaagctctctattgtcctgaccccacagttcctgtcccatgaccagggccagctcaccaaggagctgcagcagcatgtaaagtcagtgacatgcccatgcgagtacctgaggaaggttatcaatactctggctgaccatcatcatcgtgggactgactttggtggaagtccttggttacatgtcattattgcgtttccgacaagttataaagttgtcattaccctctggatagtttacctttgggtgtctctcctgaagactatcttctggtctcgaaatggacatgatggatccacggatgtacagcagagagcctggaggtccaaccgccgtagacaggaagggctgaggtccatttgtatgcacacaaagaaaagagtttcttcctttcgaggaaataaaattggcctgaaagacgtcattactctacggagacatgtggaaacaaaagttagagctaaaatccgtaagaggaaggtgacaacgaaaatcaaccatcatgacaaaatcaatggaaagaggaagaccgccagaaaacagaaaatgtttcaacgtgcgcaagagttgcggcggcgagcagaggactaccacaaatgcaaaatcccccttctgcaagaaaggctctttgcaactgggtcagaatggcggcagcggagcatcgtcattcttcaggattgccctactggccctacctcacagctgaaactttaaaaaacaggatgggccaccagccacctcctccaactcaacaacattctataactgataactccctgagcctcaagacacctcccgagtgtctgctcactccccttccaccctcagcggatgataatctcaagacacctcccgagtgtgtgctcactccccttccaccctcagcggatgataatctcaagacacctcccgagtgtgtgctcactccccttccaccctcagcggatgataatctcaagacacctcctgagtgtctcctcactccccttccaccctcagcggatgataatctcaagacacctcccgagtgtctgctcactccccttccaccctcagctctaccctcagctccaccctcagcagatgataatctcaagacacgtgccgagtgtctgctccatccccttccaccctcagcggatgataatctcaagacaccttccgagcgtcagctcactccccttccaccctcagctccaccctcagcagatgataatatcaagacacctgccgagcgtctgcgggggccgcttccaccctcagcggatgataatctcaagacaccttccgagcgtcagctcactccccttccaccctcagctccaccctcagcagatgataatatcaagacacctgccgagcgtctgcgggggccgcttccaccctcagcggatgataatctcaagacaccttccgagcgtcagctcactccccttccaccctcagctccaccctcagcagatgataatatcaagacacctgccgagcgtctgcgggggccgcttccaccctcagcggatgataatctcaagacaccttccgagcgtcagctcactccccttccaccctcagctccaccctcagcagatgataatatcaagacacctgccgagcgtctgcgggggccgcttccaccctcagcggatgataatctcaagacaccttccgagcgtcagctcactccccttccaccctcagctccaccctcagcagatgataacatcaagacacctgccttccaccctcagcggatgataatctcaagacaccttccgagcgtcagctcactccccttccaccctcagctccaccctcagcagatgataatatcaagatacctgctgagcgtctgcggattccgcttccaccatcagccgatgataatctcaagacaccttccgagcgtcagctcactccccttccaccctcagctccaccctcagcagatgataatatcaagacacctgccgagcgtctgcgggggccgcttccaccctcagcggatgataatctcaagacaccttccgagcatcagctcactccccttccaccctcagctccaccctcagcagatgataatatcaagacacctgccgagcgtctgcgggggccgcttccaccctcagcggatgataatctcaagacaccttccgagcgtcagctcactccccttccaccctcagctccaccctcagcagatgataatatcaagacacctgccgagcgtctgcgggggccgcttccaccctcagcggatgataatctcaagacaccttccgagcgtcagctcactccccttccacactcagctccaccctcagcagatgataatatcaagacacctgccgagcgtctgcggggagcgtctgcgggggccgcttccaccctcagcggatgataatctcaagacaccttccgagcgtcagctcactccccttccaccctcagctccaccctcagcagatgataatatcaagacacctgctgagcgtctgcgggggccgcttccaccctcagcggatgataatctcaagacaccttccgagcgtcagctcactccccttccaccctcagctccaccctcagcagatgataatatcaagacacctgccgagcgtctgcgggggccgcttccaccctcagcggatgataatctcaagacaccttccgagcgtcagctcactccccttccaccctcagctccaccctcagcagatgataatatcaagacacctgccgagcgtctgcgggggccgcttccaccctcagccgatgataatctcaagacacctcccttagctactcaggaggctgaggcagaaaaaccacgcaaacccaagaggcagagggcggctgagatggaaccacctcccgaacccaagaggcggagggtcggtgacgtggaaccgtcacgcaaacccaagaggcggagggccgctgacgtggaaccatcatcacccgaacccaagaggcggagggtcggtgatgtggaaccgtcacgcaaacccaagaggcggagggccgctgacgtggaaccatcatcacccgaacccaagaggcggagggtcggtgacgtggaaccgtcacgcaaacccaagaggcggagggccgctgacgtggaaccatcattacccgaacccaagaggcggaggttgagctgagaagaggccagtgcactcaagcctgagcaataagaataaaaccgagtagaacaaaataaaaaattcaaaaaacaaaacaaaacccacactccaaaaactaacaaagaataaataaataatataaaaat

SEQ ID NO: 46 - DNA, 315 bp, Homo sapiens
ggagacagggtctcgctctgttgcccaggctggagtgcagtggtgcaatctgagctgactgcagcctcaacctcctggactcaagcaatcctcccaccacagcctcccgagtagctgggaccacaggtgcgcaccaccacacctagctaatttgtaaaaaatttgtagtgatggggtcttgctatatagcccaggctggtcccaaactcctgcctcagccattttttgtttttaatataagcaaattatctcctccatccctccctggggcaggagacagctaaggtggggaaggctccccagagggttgcagag

SEQ ID NO: 47 - DNA, 349 bp, Homo sapiens
agcgagatgacgaagggaacgtcatcgtttggaaagcgtcgcaataagacgcacacgttgtgccgccgctgtggctctaaggcctaccaccttcagaagtcgacctgtggcaaatgtggctaccctgccaagcgcaagagaaagtataactggagtgccaaggctaaaagacgaaataccaccggaactggtcgaatgaggcacctaaaaattgtataccgcagattcaggcatggattccgtgaaggaacaacacctaaacccaagagggcagctgttgcagcatccagttcatcttaagaatgtcaacgattagtcatgcaataaatgttctggttttaaaaaatac

SEQ ID NO: 48 - DNA, 484 bp, Homo sapiens
gtatacattttacatgtattcaggagtgggatgtacatcagtctctcttttttttttttttattgatcattcttgggtgtttctcgcagaggggatttggcagggtcataggacaatagtggagggaaggtcagcagataaacaagtgaacaaaggtctctggttttcctaggcagaggaccctgcggccttccgcagtgtttgtgtccctgggtacttgagattagggagtggtgatgactcctaacgagcgtgctgccttcaagcatctgtttaacaaagcacatcttgcaccgcccttaatccattcaaccctgagtggacacagcacatgtttcagagagcacagggttgggggtaaggtcatagatcaacaggatcccaaggcagaagaatttttcttagtacagaacaaaatgaaaagtctcccatgtctacttctttctacacagacacggcaaccatccgatttctcaatcttttc

SEQ ID NO: 49 - DNA, 1083 bp, Homo sapiens
atcctgtctgtccgaacccagacacaagtcttcactccttcctgcgagccctgaggaagccttctttccccagacatggccaacaagggtccttcctatggcatgagccgcgaagtgcagtccaaaatcgagaagaagtatgacgaggagctggaggagcggctggtggagtggatcatagtgcagtgtggccctgatgtgggccgcccagaccgtgggcccttgggcttccaggtgtggctgaagaatggcgtgattctgagcaagctggtgaacagcctgtaccctgatggctccaagccggtgaaggtgcccgagaacccaccctccatggtcttcaagcagatggagcaggtggctcagttcctgaaggcggctgaggactctggggtcatcaagactgacatgttccagactgttgacctctttgaaggcaaagacatggcagcagtgcagaggaccctgatggctttgggcagcttggcagtgaccaagaatgatgggcactaccgtggagatcccaactggtttatgaagaaagcgcaggagcataagagggaattcacagagagccagctgcaggagggaaagcatgtcattggccttcagatgggcagcaacagaggggcctcccaggccggcatgacaggctacggacgacctcggcagatcatcagttagagcggagagggctagccctgagcccggcgctcccccagctccttggctgcagccatcccgcttagcctgcctcacccacacccgtgtggtaccttcagccctggccaagctttgaggctctgtcactgagcaatggtaactgcacctgggcagctcctccctgtgcccccagcctcagcccaacttcttacccgaaagcatcactgccttggcccctccctcccggcggcccccatcacctctactgtctcctccctgggctaagcaggggagaagcgggctgggggtagcctggatgtgggcgaagtccactgtcctccttggcggcaaaagcccattgaagaagaaccagcccagcctgccccctatcttgtacctggaatatttttggggttggaactc

SEQ ID NO: 50 - DNA, 469 bp, Homo sapiens
tttttttttttttaaaaacagaagcgcgaccatttctttattaaattatacaaaagggttggggaggggggcagctgtggggctcggcacaccccgggccccaccccggcctggcgctgtctgagaagaggggatctgagggagatccagggatcaggcaggatagggatggggcaggacatgaggctgggggatgcagaggttaggtgggagaggctaccggagtaagaatgaggctggtaggggagggagaaagagagcaaagagagagaggagcaattgggggccagctggagagctcagatggagcaggtcaggaggtggaacaatggcagagtgagggtggagggcgcagtgtctggagaggcggaaatgagaaggctggggagaaagaagagggtggcagctctggtgcagggcccagagcagggagccaggtgaagagtggctggactttgctgcccccacc

SEQ ID NO: 51 - DNA, 345 bp, Homo sapiens
  misc_feature: n=a,t,g or c
nagtntaagttatttatttaagncattctccttgccacaagcaaagngatgnganaccagtataccagtcatcattttgatacaagtaaagnaggtgagcttaaggtcccatatactttttctggtccatgtgcanagtaacggtccaaaccagtgctgtggtccctggtgcccgggtagtggtccagattctctttattcatcttcgtagccagttggaagtggattcacatgagggttatggaatagagtatggttaccatcntccccagggaaacggcttgggtcctgatgcggagattgggggtaggnngatgaactcgggtctctcgtngcgctccgtgg

SEQ ID NO: 52 - DNA, 684 bp, Homo sapiens
cctttttgtcccagttgtcattattttcgaattcctaaaaaagctgaaggtgtcggagctgaaagaggagctcaagaagcgacgcctttctgacaagggtctcaaggccgagctcatggagcgactccaggctgcgctggacgacgaggaggccgggggccgccccgccatggagcccgggaacggcagcctagacctgggcggggattccgctgggcgctcgggagcaggcctcgagcaggaggccgcggccggcggcgatgaagaggaggaggaagaggaagaggaggaggaaggaatctccgctctggacggcgaccagatggagctaggagaggagaacggggccgcgggggcggccgactcgggcccgatggaggaggaggaggccgcctcggaagacgagaacggcgacgatcagggtttccaggaaggggaagatgagctcggggacgaagaggaaggcgcgggcgacgagaacgggcacggggagcagcagcctcaaccgccggcgacgcagcagcaacagccccaacagcagcgcggggccgccaaggaggccgcggggaagagcagcggccccacctcgctgttcgcggtgacggtggcgtgaagcctgtgaaagtttcagctccccgagttggtggaaaacgctaaactggcagattagatttttaaataaag

SEQ ID NO: 53 - DNA, 4029 bp, Homo sapiens
gtcgggggcgggacaggacaccctgcccaccggaggggcgcgccaccgccgcccccgctccactccgccagggggcgctgtgtggctcccgagtaggctcagagcgaccgtggccgggcggaagcggctttctggcctaagctttaacaggcttcgcctgtgcttcctgtttcctcttttaccaaggacccgccaacatggtaggtgttttggctcgaggccgccatcctccacaatcgtcccccatctgcagcttcccgcggtcctcagcccacagagaggccctgggccggaaggcgcagagccctgtcaggctggagcgcaacgggccggcggcttccgcattaagcccggcgcccggcactgtttagccgggccctctccggctcagcgcagccggcggtccccaaccacaccggccggggctcggcgccgcactcttcccagaaggttgcgctggctcgtgagtgatcctgtcctctccacccgcagggccgcgttcgcaccaaaaccgtgaagaaggcggcccgggtcatcatagaaaagtactacacgcgcctgggcaacgacttccacacgaacaagcgcgtgtgcgaggagatcgccattatccccagcaaaaagctccgcaacaagatagcagggtgagtcgggccttcctcggcctccgggcgtccgcgatctgtttgtgtgctctgccgccctccgactcgggaagagacggtgccttggtggtttcgttagcctgagactccctggtgtcccggagaagggctagagctctgcgtgtgcaggatttctgttgtgaacttaggcctgtgtcatgactggccgcggtgaccctgggtcgaaggtagccaccgtcagacctcttgctttgaagctacgttgcttttagttgtcaacttttttctttcttttttttcttttttttttgagacggaatcttgccctggcgcccaggctagagtgcagtggcgccatctcggctcactgcaacctccgtctcccgggttcaacgcgattgtcatgcctcagccttcccagtagctgggattagaggcacgtgctaccacactcggctaatttttgtatttttagtagacaacagggtttcacaatgttgaccaggctggtctcgaacacctgacctcaagcgatccgcccgcctcggcctcccaaattgctgggattacaggcgtgagcacctcgcccggctggatgtcaacttctaatgcttacttcacagttgcagttactgttcgagagatttataggcatatggcctggaagaatagtgccaaagtcaacgtattaattgccaagttatgtgaatttgaaattggaagaaaatgaaggctgtgaagggtcgtgaaactgcggggcggggcggggcgagtggggggtggggcgcttgatcatcatgaaggagagtttgaatagagagtgagaaagccaaggggaaggaatgctcaggccagtggaggttctatgtgtaggaggtcccaggatagtgagtcctcttccttctcactgtggaaaagaactaaagcgggtatttatatatccacatgtgctcagtaccaggtgggagttgatttgtcttctcactgttctctttggctgtgtgtgctttgtagttatgtcacgcatctgatgaagcgaattcagagaggcccagtaagaggtatctccatcaagctgcaggaggaggagagagaaaggagagacaattatgttcctgaggtaaactttctggatatttgggcttctggctaatcctcaaatgataaagctatgggttcttggcttccaaagggacctcagctgaatctgagacctttaatccatacattccataaccagctgtgggtgcccataggccccctaccagtttcttagcctccattctgctcttctggaaccagttaagtctattccatatttcatgagagcccttaatgttgatttgatgactgctgtcgtggctcgattgtttgcccctaatatagtattctttggtgtaaacacagacttcaagtgttctgaatactgaatgagggcatgggaaggtaaggccagaagaacaggtcatcggggtctgtaatactgtaagagactgctcaccttgtgagaggaatgctatccttgtgcagctcctcttccccatatttaagaacctggggagaggaggaggagaggtgagtgataatctcattgattggtattttgaccctacctcgtttccttgtaggtctcagccttggatcaggagattattgaagtagatcctgacactaaggaaatgctgaagcttttggtaagtgtttgctggattcctaaagtggtattttcctggtcaaaaaccatcagtaggtcttattatccaaggtcacccagctagtaagtggcagagttgggaatcccatctaaacttgtagccactaaactggactgctttcataaggggtgtagcggaagttgtgtgcattgagttagttcgccacaagatcatgattcccaaatctagtgcttccaggacacttttctctcttggctgcttctgttcttggtttatagctggcttacgttgccccctttgtgtcagccctggctgaatctgcctgcttttcttctgtgaaggcattcctttggtgtctccatgctaaccactcagaaatgagctttggtccatttccaggtacatacaaggcactacttaggtagttcacgagtatcttcattgcactttgatgttttttctatggcttatcttagtccttttgcatacttgggtgaaagcatgggcttcatgggcggttggtgattttgaacaacttcatttttcctatttttatggtcattaaatgtttaagacactcaaaaaggtagtagcaaaatgaactcacatgtactttcccagctacagccccgctgtgggtcttttcttcctgaaataaccactgcgctgaatgcagcatttttgttgaaactaaaatgggtttctgaggaccaaataggacatggagttccaggtataagttgggcccttggcttcttgccctgcctaccagcctgaacttgtttgagggcagggtctgctcttgcctccctcccttctgcttgatgccttgtgtacttgggcccttcacaaatgttgattagattagtaatagctcttacccagggctggtcctggaaagcaagtggcactgtgtattctcaaagggacagagttttgctttagaggacatttggcaatgtccagacacatttttcgttctcatagccaggggatacctgctaacttctaatgggtagaggccaaggatgttgctaaactttctgcaatacacagtacagctgcctataacaaagaatgtccagcccaggatgtctacgttgccaagattgagaaacggtgttttagagtgattgataggaaggggttgtgaaaacagatacaaatggcatggtacattgggtaaaagtcatagagttgtaaatggggataccacatggtcaggtgtgtgttgaaggaagatcactctggaaaacgtgggaggcattgagaaccctgttggctcttaaagggtccttcaggtcgcctctggacccccttgagagtgctgtggctctaggggcctgtgttttcttctggggtccactcacagatctcaccagtaactgctcactgaatccattttctcgttccaggacttcggcagtctgtccaaccttcaggtcactcagcctacagttgggatgaatttcaaaacgcctcggggacctgtttgaattttttctgtagtgctgtattattttcaataaatctgggacaacagccttgcctgtgtcatctttgcagttgtgtgtgggtagaggaaaggcaggagctctcgaggcaacagatcagctggcacttgtctgggattcaggtgctgctgcatctggtttatggggagtgggttcaccagagtttagtaaaggagcaagggcaagcctgaacgtgttgagagtggtctgcag

SEQ ID NO: 54 - DNA, 329 bp, Homo sapiens
cgacctacgcacacgagaacatgcctctcgcaaaggatctccttcatccctctccagaagaggagaagaggaaacacaagaagaaacgcctggtgcagagccccaattcctacttcatggatgtgaaatgcccaggatgctataaaatcaccacggtctttagccatgcacaaacggtagttttgtgtgttggctgctccactgtcctctgccagcctacaggaggaaaagcaaggcttacagaaggatgttccttcaggaggaagcagcactaaaagcactctgagtcaagatgagtgggaaaccatctcaacaaacacattttggat

SEQ ID NO: 55 - DNA, 418 bp, Homo sapiens
tttttttttttttttttttttttttttttttttttttttttttctggctccaaagatcctttactgagatccacttgaaacacttcggtccttaacttgttaactgagttgacaggctgatggctgatctaggtaaaggtttcacggtagcaaaaacacttcctgcctataatacatcaaaacaggttcctgaatgtgtgtgaatatcatcaaggtctctgtcccatcttcttcagggttcgattaagctcctcaaatttgtggatctgacggatgaagaaatccccataacgcctggcgaccttggtgtccgcgatgtggatcatgtccttatcaatgtagaagtcaacctctgaggctgactgaaattcaccatccagggctgagataccgctggtccacacgaggttcttcatct

SEQ ID NO: 56 - DNA, 410 bp, Homo sapiens
tttttttttttttttttttttacaaagaatcaactttattgaacattcagggtcagtttctcttcttgctcttgcctgtgaccttggctggtgtgaggactggagctgctgcctggtacagggtggaggagatcttgttgatgtagtacagaccaaccatggagaagatgaagcaggtggtgacacagactcggtggatgaggccagatgcaaagagagccaacaggaggcacaggagaatctcagggaagatctttgcttggaatcctttgccaaagacaagattctccagattattgaaggcagtgagcgagaacacgaagagacccgaaccaagcaggccgccctggatggtgagccactcggtggaggccagctgacggctgtacatctgcatcccagcaaagagc

SEQ ID NO: 57 - DNA, 519 bp, Homo sapiens
  misc_feature: n=a,t,g or c
aaccacanaagagtagcagtccattttctggaagngcgcatgatattatgancaatacaaatgcattatttttatcattaatagtntaatcattaattatcncanaagtcaatgcagagagtgaaattantntgaattaaacttcngttcanaatgtacagtattttgcatatgtngactttacttaatngtncattnttgtttccaaagttaangttaaatacctggtgcataggttgttgtcaagcaattactctcattgtcttgtcatacatgctaacattttgctaaatataaatctacaagtatcacagctgcatatatttctgaagtggttagaacagaggaggatgctggaaagttgagttctttaaaatcttcgttcaaaacaagagattttcatctatgtcctcttctttaattccaaagcagtggncccactccttcagggtgatgtgcttatccttnttggggtcacactccntcaaataaacgggttatgccagtgttccatgggcc

SEQ ID NO: 58 - DNA, 326 bp, Homo sapiens
  misc_feature: n=a,t,g or c
aactttytaaactttttatttgcatabtaaaaaahtybtgcattccaataattaanvatcatttgaacaaaaaaaaaaaatggcacbctgattaaactgcattacagcctgcaggacaccbtgggccagcttggttttactctagatttcactgtcgtcccaccccacttcttccaccccacttcttccttcaccaacatgcaagttbtttccttncctgccagccagatagatagacagatgggaaaggcaggcgcggccttcgttgtcagtagttctttgatgtgaaagggmagcacagycatttaacttgghcccacctcttt

SEQ ID NO: 59 - DNA, 384 bp, Homo sapiens
tttcgggaacaataacatgagagtttattatcacatgactactcaggaggggacatgaagcggcagcgatggggaaggggtgtaaggaatgggcaagtgctgctggagcagggctgtggcacggtcatggggccaggataactggggctgttgaagagcctcttttcctcagtctggttcttcttccagcagtcagatgcagggacgcccggtgcagaagcacaaggcactaataatcaggagaggcatggctagattccactcacttccaacatttccttctggtctcttttccctttggttgggaacattctccagcagtacagccacagaggggtcagagattccagaagcagcagaatccagacacccaagagcatggcc

SEQ ID NO: 60 - DNA, 987 bp, Homo sapiens
gagcagcggacgccggtctctgttccgcagatggggtttgttaaagttgttaagaataaggcctactttaagagataccaagtgaaatttagaagacgacgagagggtaaaactgattattatgctcggaaacgcttggtgatacaagataaaaataaatacaacacacccaaatacaggatgatagttcgtgtgacaaacagagatatcatttgtcagattgcttatgcccgtatagagggggatatgatagtctgcgcacgttatgcacacgaactgccaaaatatggtgtgaaggttggcctgacaaattatgctgcagcatattgtactggcctgctgctggcccgcaggcttctcaataggtttggcatggacaagatctatgaaggccaagtggaggtgactggtgatgaatacaatgtggaaagcattgatggtcagccaggtgccttcacctgctatttggatgcaggccttgccagaactaccactggcaataaagtttttggtgccctgaagggagctgtggatggaggcttgtctatccctcacagtaccaaacgattccctggttatgattctgaaagcaaggaatttaatgcagaagtacatcggaagcacatcatgggccagaatgttgcagattacatgcgctacttaatggaagaagatgaagatgcttacaagaaacagttctctcaatacataaagaacagcgtaactccagacatgatggaggagatgtataagaaagctcatgctgctatacgagagaatccagtctatgaaaagaagcccaagaaagaagttaaaaagaagaggtggaaccgtcccaaaatgtcccttgctcagaagaaggatcgggtagctcaaaagaaggcaagcttcctcagagctcaggagcgggctgctgagagctaaacccagcaattttctatgattttttcagatatagataataaacttatgaacagcaactaaaaa

SEQ ID NO: 61 - DNA, 404 bp, Homo sapiens
actttyccaatagtttwatttgtatttttctttaaatatccttttctggaatttttcagaaacaaaacataaaaaaattatatactttattacaaatkggaaactcagagtgctccaaatctcttatttacaaacaacactgggcaggatacccaaacaaacaaacaagaaatwcttacaaaggcatgaagctgtttattgacagtaatcagctttcatcaaattaaaaaatatatatwtbtwcatacacagttaacgaggcaggccagaaagagttyatctgtaggctcagcctcgctctcacctcgtgccgaattcctkcagcccgggggayccactagttctagagcggccgccaccgcggtggagctccagctttttttccytttagtgaggggtaattg

SEQ ID NO: 62 - DNA, 1330 bp, Homo sapiens
gcagcccagccaagcactgtcaggaatcctgtgaagcagctccagctatgtgtgaagaagaggacagcactgccttggtgtgtgacaatggctctgggctctgtaaggccggctttgctggggacgatgctcccagggctgttttcccatccattgtgggacgtcccagacatcagggggtgatggtgggaatgggacaaaaagacagctacgtgggtgacgaagcacagagcaaaagaggaatcctgaccctgaagtacccgatagaacatggcatcatcaccaactgggacgacatggaaaagatctggcaccactctttctacaatgagcttcgtgttgcccctgaagagcatcccaccctgctcacggaggcacccctgaaccccaaggccaaccgggagaaaatgactcaaattatgtttgagactttcaatgtcccagccatgtatgtggctatccaggcggtgctgtctctctatgcctctggacgcacaactggcatcgtgctggactctggagatggtgtcacccacaatgtccccatctatgagggctatgccttgccccatgccatcatgcgtctggatctggctggccgagatctcactgactacctcatgaagatcctgactgagcgtggctattccttcgttactactgctgagcgtgagattgtccgggacatcaaggagaaactgtgttatgtagctctggactttgaaaatgagatggccactgccgcatcctcatcctcccttgagaagagttacgagttgcctgatgggcaagtgatcaccatcggaaatgaacgtttccgctgcccagagaccctgttccagccatccttcatcgggatggagtctgctggcatccatgaaaccacctacaacagcatcatgaagtgtgatattgacatcaggaaggacctctatgctaacaatgtcctatcagggggcaccactatgtaccctggcattgccgaccgaatgcagaaggagatcacggccctagcacccagcaccatgaagatcaagatcattgcccctccggagcgcaaatactctgtctggatcggtggctccatcctggcctctctgtccaccttccagcagatgtggatcagcaaacaggaatacgatgaagccgggccttccattgtccaccgcaaatgcttctaaaacactttcctgctcctctctgtctctagcacacaactgtgaatgtcctgtggaattatgccttcagttcttttccaaatcattcctagccaaagctctgactcgttacctatgtgttttttaataaatctgaaataggctactggtaa

SEQ ID NO: 63 - DNA, 414 bp, Homo sapiens
  misc_feature: n=a,t,g or c
gctgggactgccccaaaggcnaaacnnggtttattgggcagcagctgggaaaatcagcggttggacttggccacacgctccagctcgtccttcttcttaatggcataggagttcgaggagcccttggcagccattgatgngctcatctgccaggcactcagcaatggtcttaatgttccggaaggcagcctcangagcgcctgtgcacagcagccagatggcctggttcanacggcgcaggggggacacatccacagcctgncgtctcacagncccggngcgcccaatgcgngtggagtcctcccggggaccactgttgatgatggngtnnaccaggacctgcanagggttcnngcctgngagnaggtgtatgatctcgaaggcatgcttgacgaagcgcaaagtcaagagctt

SEQ ID NO: 64 - DNA, 509 bp, Homo sapiens
  misc_feature: n=a,t,g or c
tttttttttttttaagtcacaggcgcatttattattgtctggaacatcaaggcctttcctcccctggcagtggcacaagggagggccaactctcagnaggcggccagtgccaccagcagcaggcccaatgggtgggcaggggtcnatgngcgggnaaaaanannncctnnagctngccgaaaagctggcgatntcaggatcctgggcttcgtaggacttgaccaagcgagcaaacttaaggacaccttccccgtcgcagctgaagccataggtttgataacctcctgctggatctgcgtggccacgggcagcacgaattgcagcatcttacccatgtcgttgcaggcgttatcccgagcctcgtccatgcgcactgcattctccggggcggaaaacgctggatcacctccgcgagaccacctttgcttgctcaacgctcaaggccgccggttggggngaagcggaccataaggggctgaaantctangttcnacggagggtaaatggga

SEQ ID NO: 65 - DNA, 543 bp, Homo sapiens
caggcggccgggaagatggcggacattcagactgagcgtgcctaccaaaagcagccgaccatctttcaaaacaagaagagggtcctgctgggagaaactggcaaggagaagctcccgcggtactacaagaacatcggtctgggcttcaagacacccaaggaggctattgagggcacctacattgacaagaaatgccccttcactggtaatgtgtccattcgagggcggatcctctctggcgtggtgaccaagatgaagatgcagaggaccattgtcatccgccgagactatctgcactacatccgcaagtacaaccgcttcgagaagcgccacaagaacatgtctgtacacctgtccccctgcttcagggacgtccagatcggtgacatcgtcacagtgggcgagtgccggcctctgagcaagacagtgcgcttcaacgtgctcaaggtcaccaaggctgccggcaccaagaagcagttccagaagttctgaggctggacattcggcccgctcccacaatgaaataaagttattttctattcc

SEQ ID NO: 66 - DNA, 371 bp, Homo sapiens
cagccatcgtggtgtgttcttgactccgctgctcgccatgtcttctcacaagactttcaggattaagcgattcctggccaagaaacaaaagcaaaatcgtcccattccccagtggattcggatgaaaactggaaataaaatcaggtacaactccaaaaggagacattggagaagaaccaagctgggtctataaggaattgcacatgagatggcacacatatttatgctgtctgaaggtcacgatcatgttaccatatcaagctgaaaatgtcaccactatctggagatttcgacgtgttttcctctctgaatctgttatgaacacgttggttggctggattcagtaataaatatgtaaggcctttcttttt

SEQ ID NO: 67 - DNA, 376 bp, Homo sapiens
ttattattcatttatttatttattctgagacggagtctcactctgtcgcccaggctgaagtgcagtggcgcgatctcagctcactgcaacctctgcctctagggtccaagcgattctcctgccccagcctccagagcagctgggaccacagacacacaccaccacaccccgccaatctttgcaattccagtagagaccaggcttcaccatattggtcaggccggtccggaactcccgacctcaggggacccacccgccctggcctcccaaagtactgggattacaggagtgaaccaccacacccggctctgcctttctttgacccctcccagactggaccatcttgctactctctccagtcgttttcaccttgatt

SEQ ID NO: 68 - DNA, 288 bp, Homo sapiens
  misc_feature: n=a,t,g or c
gctttttaaatngctttattagctttaaatttyyccatgcaaatsggtgaactactgctgacagaaacttacactgrgtgcaaaggcaatctytcaaatagaagctggcaacacaagmcccacttgacacatggaaataacatagggttcacagcaaacggatcagtaaaggcatattaggraaatgcaaggaaaaagaaaacagcgggaatcacagtattaatctcatgataaatggcaggggtcaaggcataaggcaaawttcatcatgatggtcatggtgwttag

SEQ ID NO: 69 - DNA, 265 bp, Homo sapiens
aacttgaaacacaaacgctttatttaaaggagcatctcagttacgtgtggcggacaaaaaaaaggagcagattgtgacagaccattcccatcggccaagtggtcaaccccgacatccaagacccagcgagcaccaagctcaggtacaccctccgggcttctcgctctgactccaaaagggtgagcacgtcgccctgcggcaagcgggcctatattacatatgcggatgataggattcggctcgtgtacgtccatgaagttccacg

SEQ ID NO: 70 - DNA, 150 bp, Homo sapiens
tttatctttatttttttgagatggagtcttgcagttgtcgcccgagctggagtgcaatagcgcaatctcggctcacttcaacctccgcctcccaggttccagcacctctcctgcttcagcctcccaagtagctgagattacaggcgtccg

SEQ ID NO: 71 - DNA, 316 bp, Homo sapiens
tttttttttttttttttttctttctacattttattatttcaaaccaggtgaacaattccataaaacatgtgaaaaaagcaaggaagtgttcaacgctgaaggccccgggctgtggacaagggcatgaggggcgtggccccaagcaggcagcggcggttcctaggttagcgctagggagctacattttaggttaatagagcctggggccagggccgctggggcagggcctccagtgacgttggcagttgtctggaacagcccttggaacccaattctgtggagggcagggcaggggtgccgctcgcacgggggcggc

SEQ ID NO: 72 - DNA, 432 bp, Homo sapiens
  misc_feature: n=a,t,g or c
ccattaaaaaaactttattttcattttttacaaagaatatccccatctgggtcaaaaatatanctggttaagtacnaaatatagtctttaccatacanaaagatncataanacaaaaacatgaaaccaaccatcttcagcccacactttctggctgtaatanctctcagaaaagggtggagctcagtgctctgncacaggacagtgaacaaagtgctatggctgagagtgactgaccaagtgctggcagctgcacgtgaggggccaatatccctatctcctaacacagggcaggaagggggttcaaagggcttntatagaagacctgccctctagtttcctcatnggcagtatttcggaggttctgatncacagggttgggcatcttggatcaagagttcctccttggggtttgaagtnacagtggggcaag

SEQ ID NO: 73 - DNA, 421 bp, Homo sapiens
gttggagccgctgccgtcgccatgacccgcggtaaccagcgtgagctcgcccgccagaagaatatgaaaaagcagagcgactcggttaagggaaagcgccgagatgacgggctttctgctgccgcccgcaagcagagggactcggagatcatgcagcagaagcagaaaaaggcaaacgagaagaaggaggaacccaagtagctttgtggcttcgtgtccaaccctcttgcccttcgcctgtgtgcctggagccagtcccaccacgctcgcgtttcctcctgtagtgctcacaggtcccagcaccgatggcattccctttgccctgagtctgcagcgggtcccttttgtgcttccttcccctcaggtagcctctcttccccttgggccactcccgggggtgagggggttaccctttcccagt

SEQ ID NO: 74 - DNA, 357 bp, Homo sapiens
acctaggtcgcggcgacatggccaaacgtaccaagaaagtcgggatcgtcggtaaatacgggacccgctatggggcctccctccggaaaatggtgaagaaaattgaaatcagccagcacgccaagtacacttgctctttctgtggcaaaaccaagatgaagagacgagctgtggggatctggcactgtggttcctgcatgaagacagtggctggcggtgcctggacgtacaataccacttccgctgtcacggtaaagtccgccatcagaagactgaaggagttgaaagaccagtagacgctcctctactctttggagacatcactggcctataataaatgggttaatttatgtaaca

SEQ ID NO: 75 - DNA, 341 bp, Homo sapiens
tttttttttttttttttttttaacagtgaaccatatttcaatttattgacattgtcaatttatgaacaagacaggattttttttttttcccatggaatgagatccttttcaatctgccataacatgtgcccacacatcttcaccttggaaatgtagcatttcaagctttagtcagggtagattattccttctttactttcacaatttttacgttgctgccagaagtcttctcagcatttgctttgaattctgtcttcagtgcatctctcactgcttttgcacagatctgggagtatcggatgtagctgagtccagcctgtctccagtaggccaccatgctg

SEQ ID NO: 76 - DNA, 139 bp, Homo sapiens
tttttcaggcttccgggtctttaatggggcgggggctgggggcagttcatccagaggtggctccgaagctgaggtcaaccttggcggctggctcgctactccagggccttcaccagggcctcgttggctcgattcggat

SEQ ID NO: 77 - DNA, 186 bp, Homo sapiens
  misc_feature: n=a,t,g or c
aaaatttaaaataaaattttattttatcttatactcaagttcagacaatagcatgtggtgtacattcaaaatttttgacaggtacagagcacattaaaaaatgaagacatgatcaaggagatgtaagagacaaatagacaacaacattctccctgaatctggaaaaaagcnagccnttagggtncc

SEQ ID NO: 78 - DNA, 148 bp, Homo sapiens
caaagattcactttatttattcattctcctccaacattagcataattaaagccaagagggcgcatgggggtgaggtgaaagatgagctggaggaccgcaataggggtaggacacctgtcgaaaaagggtcagaggccaaaggatggga

SEQ ID NO: 79 - DNA, 145831 bp, Homo sapiens
aagctttaagtgcagagcaagaaggaattgaaccttttattatgattccttgagcacctaactaggtgctagactaatgattacaacctgctaacacagaggagtgatttttgtttttaaattgagttaacttaatatatcaaaaaaagaaatctgtttctggcattgctcgaaaaagcagaggacctgacactgcagaatgcagagtgcgagtagcagtccctgtgagatgggctttttgctctgcttttccgcagacctcaccactccctgtcgtctcccaggccatggtaaccattgaccgtggcacctcttttgttcactcacacacgccctgcttcactcatgccttacctgctttgtctctgtagacagtgggaccctccaccctataccaaacctctggggttgggaaaatcatgatccagagccaaggtggatgggcccccctgctcattggaactccaagcccaagtccctgaaccatgaaccccaaaggacatttttccagttctggttctgcttctggaatgcccagggggtcaggagaagccctccttccaaactttagcaggtgacaatttttccgccttagagacctggcccagcaatcttagcctactctggaagcagtgtccacccggggacacaaggaacaagcagattgtgaacagaggcctcctgggtgccagccactgcactggtccctagagggtagaaagacactgtaactggaagctgccctttgtcaagccccaagcattagcccttctgatctttttttttttttaacatggagtctcgctctgtcacgcaggctggagagcagtggtgtgatcctggctcactgcaacctccatttcctgagttcaagcgattcttgtgcctcagcctcccagtagctgggattacaggcacatgccaccacgcccagctaatttttgtatttttagtagagaagtggtttcaccatgttggccaggttggtcttgaactcctgaactcagatgatcctcccacctccgcctcccaacgtgctgggattacaggcatgagccactgcacccagccttctgatctttcaagtcattattgcttcaaagaacctcctccagtaatacaaggataatctatgcaaagacctcaggagaatatttaaaaataagtatgtatcacaaaaagcagccctcttccctggaggcaaacatgattcacaggttcatgtatgtacacacacacacacacacacacacacacacacaccccaaacataagaaaaagtcactccttgtatgttttgcagtatgattttttttccacttaaccctaccttatagttttttctgtctgttcataactatctagtcagacttcaaatatgtttttgaataggtaagacatgcaaatatgaaataaaatagtgtataagggaatatagaacttcccccttcgttcctatttctcgcccttccagttccccttcttagagacactgtggttgctggttacatatgtagccctccagtcatgttatttatttatttatattatttttcgagatggagtctcactctctcacccagactggagtgaagtggcatgatcttggctcactgcaacagccccctcccaggttcaagcaattctcctccctcagcctcccaagtagctgagactacaggcgtgtactaccacacccagctgatttttgtatttttagtagagagggggttttgccatgttggccaggctggtctcgatctcctgacctcaggtgatccacctgcctcggcctgccaaggtgctgggattacaggcttaagccactgtgcccagcctattgctttttttgtgataaagtctcactctgtcacccaggctggagtgcaatggtgcgatctcggctcctgcaacctatgccttctggattcaagcgatcatcccgccccagcctcctgagtagctgggattacaggtgtgcatcaccacacccagataatttttgtattttttgtaaagatgggtttttgccatgttagccaggctggtcttgaactcctgacctcaagtgatccacccacctcagcctcccaaagtgctacaattacaggtgtgagctgctccatccagcctccagtgatgttttatacacatgcagccacatagagagcccctcctgcacccctccaaaatggcagcacaggccccggctgttgtgcgtctcaatctttgcatctaactgtgtattttggccattcatccatggtagtagagagagggccactgcacagtcttctgctatagggatgaaccataatgattaagcctgtctgctattgacaggtatttaggttgtttctagtctttttgctcttaaaagcaaggctgcagcaaaagcacgtgcttggtggaccacgtctgtctctaggttgggtatttagaaagccgtgatattgcactgcagcttcataaagaagccgtgattatccatcactttactgaggaagctcaggggtaggtctgtatgcacaagtcaggcaggtgataaggcaaagccaacactctgcccaggcctgtgtgtctttttttttttgagaccaagtctcgctgtatcacccaggctggagtggagtggcacaatctcagctcactgcaacctctgccacctgagttcaagcagttctcctgcctcagcttcccgagtagctgggattacaggcacgcgccaccacaccttgctaatttttgtatttttagtagagatgaggtttcactgtgttggccgggctggtctcgaactcttgacctcaggtgatccacccaccttggcctcccaaagtgccgggattacaggtgtgagccactgcgcccggccatccctgtgtgtctgaaagccagtgttccttccacttccctcccttccctccctgttcctcatttctgctgcaggccccgggagcaccccctgctcagggctctgtggctgaccatataaagcgtcagagaaaaactggagctgcttcctaatacggtcacaagagggaaatcctgggcctgcagctgggacttgctggtggcacagggcccatgagatgccggctgggacacaggaggctgggatgttgaaacctctgaatttaaccagctggagaggggctcgtggggccagagaggcagaaacacagccaactatggttgggctgggtcgaggtgaaggagaagtggctgaataatgtgggaggaagagcccgatgctgaagccccacgaccctgccgtgagatgtgcggctgcctgcaccagtcttaccttcactccatcgtcataccctggcttgcttagaaagcttttacagaactcagcagagattcagatctacctggaagtatggattaagtgcttgttgtgtgcacggcactgggagagatgtcccaaacaaagaggatggaagtcatattcctctttcagaagctagtgatggagttgaaaaggcagtgtggtccttccttctttttaaaaattcattttattctttttttttttttctttgagacagtctcactttgtcacccaggctggagtgtggtggcatgatctcggctcacataacctctgcctccttggttcaggtgactctcctgcctcagactcctgagtagctgggattacaggcatgcgccaccacacccagctaatttttgtatttttagtaaagacggggttttgccatgttagccaggctgttctcaaactcctgacctcaagtgatctgacctcctcgatttcccaaagtgctggcattaaaggtgtgagccaccatgcccggcctcttccttctttttaaaaattccttttattcttttcttttctctatctctcatctctctttcttcctttctttcttactttccttccttccttccttcttttttttttttttttagagtctcactctgttgcccaggctggagtgcagcaccatgatctcagctcactataacctccacctcctgggttcaagtgattctcctacctcggcctcccgactagctgggattacaggcgcctgccatcatgcctggctaatttttgtatttttagtagagacggggttttgccatgttggccaggctggtctcgaactcctgacctcaagtgatctgacctccttggccacccgaagtgctgggattacagctgactgagtgtctaccctgtccctggcactgtgcggggtgcaggagatacagtagtgtgtgggtcacagtccaggaggtaacatttaggcagagctctaaaagaggagagggaaccagctgtgggaagatgaggggaaaagtgttccaagtggagagaacagcatattgaaggctctaaggtggcaagacttccctctcgtgaaatgaagggagcatagtaagagtcactaaataacattgattgagcacctactacataccagccgccatgctaaatgcttttcgagcattatctcgcagcacatctatgaagggcttgttcgtatgcctccctgttttgtagatgaggataagtgagactcagagaggttaagggacttgcccagggtcacacagcgaagaagtagcaaagtgaaggttcaaattcaagtaccccatacccagttctgagcccttagccactgccctttactgcctccaggtcaagggcttgagtgaggacaggttgggctgtaaatgatacctacattcaaaaggggcgtggcagtggacatggccccagaggagctggagatggagtcgaggcctgaaggagggtggggcttgattgacctttgttcaggtgaccacagactgggctcttctctttgggaggcttgtcctggggacaggggacactgattgaacaggaaatagcccctggcctggctcagtgtagtccactgagtacctactgccgccgtgcaaggcccccaggtcacggaggtgaagtcaggctgtccctgctcccaggaagctgtatcattaatttattcccctggcatgcatttagcaagcatttagttagcacctattctataccaaggcctgtgctgggactgaagaggagaaagggggttccccggactcaaggcacttgcagctggtgtttgcaggatgggtgggagggtcctgggtgatggaatggggaagaggggtgtccaggcaggcagccccccactcccagccccaccaggctggatgttgctcctgggccccgcttacctctaacccttgctttgcttctccatttcggtccgatggagccgcttataccaagctgcttatagttcacccccacggaccccgtgtcctgtttttctgcccatgtccctgctttgtcttgagctggttaacaccttgttgtcctttaagactcagtgcagggaatacctccccacctggaggtttccctgaccacccccaatgtgggttagggccttcccttccttgttcctatcattctctgttcttacgacgtgttttaatgtacttgtctccccctctgatttaagttctttaagggcaggagctatcattgatttctttatctccagcctctgacacagatgtggtatatagtaggtgctcagtaaatggttgatggctatttagacaggcatatgttgactcattcattctccttttaggggatggtgagaacctccgtctccatcaatcctgtttccttttttttttttttttttttttttttgagatgggttctccctctgtcacccaggctggagtgcaatggcaccaccttggctcactacaacctccctccacctcccaggttcaagtgattctcctgcctcagcctgccgagtagctgggactacaggcatgtgccaccatgccctgctaattttttgtatttttggtagaaacagggtctcactgtgttgcctaggttggtcttgaactcctgagtgtgagcaatctgccctccttggtctcccaaagtactgggatcataggtgtgaaccactgcgcccaacaatcctgtaccttcaaagaatattcctctgcagcacccccagacattacataccattgtccctgagtggactgagccctggaaggaccttcccactctctctttttctttctttttcttttttgagacaaggtctcaccgtgtcacacaggctggagtgcatggcacaatcacggcttactgcaacctcaacctcccaggcttaagcaaacctcccacctcagcctcccaagtggctgggactacaggtgaatgccaccatgcccagctaatttttaaatttcttatagagatgggggtctcactgtgctgcccaagctggtctcagacttctgggctcaagcaatcttcctgccttgacctcccaaagtgctgggattacagttgtgagccaccacacccagccagactttcccactctctaattggctccagcccttgactaaaaggcccttgagggctgggatcctgtgtttttttaatgttctaatgtagtcccagcaccttttgcatggcatctgggacgtacagaatgaatgaatgaatgaatgaatgaatgaatgaatgaacgaacgatcagtagtttctgtttctgttggatgggcctaggctggatagcataatggaccatgctcatacctgggggcgggccaggctgggcttggtgctgccaggatcttctttggtgacctcggtcaagtcacttaaccctctgttgcttggttcaccctagctgtaactgagagatggatctgtggttctccctaagtcacttgcagggaagaggatacgctttatggccatcagagtcttgggcagtactgatgtttatcgtttggggaaagcagttcctgtgagacgggttggagcctgtctcctgaactgtgacctcaaccatgggaaaatctagtatccagtaaggaaaaatcatgacaatagtgccttaccacgtacagcatggcgggactcgccttgtgccttgactcctccgtccctgatctgattattttcagatgctcctattcacccagtaggagaggactgctattttttaaatggtaaagtgcatatgacataaaatttaccattttaaacattttaaagaaaacagtgccattaagtgcattcacaatgttgtacagctatcaatttcaagacagggtcttgctctgtcacccaggggctagagtgcaatggtacaatcatagctcactattaccttgagctcctgggatcaagcaatcctcctgactcagcctcccaagtagctgggactacaggtgatcaccaccatggccagctattttttttttttttttttttttgtagagagggggtccggctgttgttgcctgagctggtctcaaacacttagcctgaagcaatcctcccaccttggcctcccaaagtgctgggattacaggcatgagccactacacttggccccagagcatttttatagcctcaaaaggaaaccttatacccatgagcagttcctcctcatttcccacctctttccagcctctgggaaccacaagtctgttttctgtctccatggctttgcctactctagacacttcacataaatgagatgatagagtacgtgacttttcgtgcctggcttctttcactaggcatattttcaagcttcatccacattggagagctcatgtcagtgttggtctctgttttgcagatggggaaggtattaatgatcaggagcaggcgctgtggggtaaacaggagttctagttcccaacttccctccagctgtgtaacctggtgacaacctcaccatgcctcactttgccctcctgtcaaacaggcggtggggaaatcactgttactgagtagttgtgaagatgccacgaggagatgcctctgccatcttctagagactgagtcactggggtttcttcttagatatggacattgggaggtcccagaaagagatcagagggtggtgggaggagagagagcttggaggattattaccttttcctccctccctcctggaccacagttttggcagctgtgtttctgtatgactgcggatccctctggacagcccctttttaggggtgtgtggctttctatgcctccaatgttcagttaacgacattccctctctggctgagtgcggtggttcccacctgtaatcccagcactttgggaggctgagactggcgcatcacctcagctcaggagttcgagaccagcctgggcaatatggtgaaaccctgtctctacaaaaaacaaaataaaaattacctgggcatggttgtgcacacctgtggtaccacctacttgggaggctgaggcgagaggatcacttaagcccagaaactcaaggttgtagtgagccaagatcaccccactacactgcagcctgggcgacagagcaagaccctgtctcaaaaaaaaaaaaaagtaaacaacattctcttctgttcttgctcttcagacttaactgctcccgtcactggttgggtttctttaattctgcacacatatctgtaaacactttctttattaaatgttcctgagttaatatcttaagcacactgttcattttctgtgccacctgttaaatgatgagcatttaatatgattgtcagcatccaaaaaagatcctgcgtagtgcttagttcggtgcccaacacatagtaagtgctcaatgaacggtggctgttatttaagccagtgaggtccggggaggtaaagtggcaggtcggaggagtggagctgagatttgaacccagagctcttcaaaactccacagtttggccaggtgcaatggctcacaactataatcccagtgctttgggaggctgaaatgagagaattgcttgagcccaggaatttgagaccagcctgagcaacacagtgaaacccatgtctctacagaaaatataaacatcagccaggcctggtggcgcccgcctgtagtcctggctactcaggaggctgaggtaggaggatcacctgagtccagaaaggtcaaggtttcagtgagtcacgttcacaccaccgcactccagcctaggtgacagagtgagaccccatctcaaaacaaacacaaaaccccccacagttgcaaaataaaacataggcagcttggaaacccactctcgccctttctcctcttcccacgtacctggaatatcagtgaggcccagggtttccactaagactccaagctccagtttccccatctctaacatgagaatattgagtgcttctgtgcaatctgtctaccctggaggaggtctggaagtaagctgggttctctgtctgcagacgtactctggcctcttctgcgtggtggtcaacccctataaacacctgcccatctactcggagaagatcgtcgacatgtacaagggcaagaagaggcacgagatgccgcctcacatctacgccatcgcagacacggcctaccggagcatgcttcaaggtgagtgaactcagggctgcacggggccagctccagggagcccctcctgtcctgcttgtctgcagttcttgccaggaatgtggagtttggcaggcactgcgagggaccaggagttactgtggctgaaaaagggaaaaagcaaaaggaacatctgtgtttgcagcctgggagggtgagggagagccaagagcttgggcaaatacgggcatgggcccgctccagctccagctccggggctcgctgcccaaggtccccgtcgggccagctgtctgcaaaggatggaaagagggtggggaacagccctggggctgagccattgtggtctgtgttgacacctacctgtccctcaacccctgtgggactgtgggtaaatatcttttcctcttcagcctcagtttcctcatttgtcaaaaggggtgatagtctctatcttgtagcttcttgtgaagattgttaatgctggtttttccaaacttaagacttgtgcctattactttcatgtttatacgttattatttttactattgttttattatttttgagacagggtctcactttctcgcccaggctgaagtgcagtggtgccatctcggctccctgcaacctccgcctcctgggctcaagcaattctcctgcctcagcctcccaagtagctgggactataggtgtggactgtcatgtcaagctaattttaaaaaggtgggtttttttgttttgtttttgttttgttttgttttgtttttggaagtgacaggatcttgctatactggttggtctcaaactcttggcctcaggcgatcctcccactttggcctcccaaagttctgggattataggcatgagccactgcacccaggccttctcaccttctatttagaacactttggagcccctgaaatagccacccccaagtcaaacagagggactaggcagttaatgcaaacaagtgtaccaggtcaggcgaagagtacaagaaactcgaaaactcacaccccctctgaaagggcaccaacaggtgggaacccagggatctgagttgggagttgagaggagcccaattctggaagttcttgaggccggaatccaggtgtgcctgagagatgccacgaccccgcccccaagatagagggactcaggtataagtgccccaactttctgacagtgagccagactccacaggtaggaccagaatcttggcccttctaggcagggcctgccattacctccaaagaccagcaggtggagccttgcaaaggcaatcttggagctgtaatctcaggttgtaaagtgatggctcctggagtcaggtatctgtcttttttttttttttgagacggagtctcgctctgtcgcccaggccggactgcggactgcagtggcgcaatctcggctcactgcaagctccgcttcccgggttcacgccattctcctgcctcagcctcccgagtagctgggactacaggcgcccgccaccgcgcccggctaattttttgtatttttagtagagacggggtttcaccttgttagccaggatggtctcgatctcctgacctcatgatccacccgcctcggcctcccaaagtgctgggattacaggcataagccaccatacccagcaattcctggttcttttctggagctgaggtcccactaagcacattttaatctaaataccaaaaagaaagaaaattctgttagcaaaggagaaggagggggagcgacagatgggtaagcatttctacagtgctctgaaaaaatttatttgtaacttgaaaaagtctttaatattgtatattcattctagaaaaacttaaacatatatttaagtaaaagagaacttgctggcacctatgattctatcatccaaaactcatcaccattaacattttgttacgtgacctttcattacactaactgaactaaatggcatgaaatgaaggaaatttttactatctgaagataattcgttccagaaaaagatcacttaaaacagagaccaaagtttcactgtagatagtatgtgtgtggaggagggaaagagagtgggcaaaatatttgactgagcttgaaaaatgacattgcaggccaggcacagtggctcacgcctgtaatcctggcactttgggaagcccagatgggtggattgctcgaggtcatgagttcgagaccagcctgggcaatatggcgaaaccctgtctctacaaaaaatacaaaaattactttggtgtggtagcacatacctgtagtcccacttcttgggaggctgaggtgggaggatcgcttgagaccaggaagtggaggttgcagtgagccgagatcacgccactgcattccagcctgggtgagagagccagaccttgtctcaaaagaaaagaaaagaaaaccaacattgcaaattataaaaataggttaatttcagcttacatgtaataagaattttattttaattacaagtaggtgctaatttgtagattcagtataaaatgaattaagagtgggtgtggggtttttttctgtaactttttctgggctgagggatgaaatcatgtgagcataaaacgacatcttcatgtcatgcttgacttctgcagcccgagctaaaaaggatcattcttacagatttatttgatgggtcaccagttttcctaagggcttcttttacttctttagtgtttaagtctctcaaagcccctgtggtcttagcgttcattcagctgtgaattgccctgaatctttttctttcttttgtctttctttctttctttttttttttttttttccggatggagtttccctcttggtgcccaggttggagtgcaatggtgtgatctcagctcactgcaacctccacctcctgggttcaagcgattctactgcctcagcctcccaagtaactgggattataggcatgtgccaccacacccggctaattttgtatttttagtagagatggggtttcaccatgttacccaggatggtctcgatctcctgacattgtgatctgcccgcctcagcctcccatagtgctgggattacaggcatgcaccatcacaccaggctaattttgtatttttagtagagatggggctttaccatgttggtcagactggtcttgaactcctggcctcaggtgatcctcccacctcggcctcccaaagtggtgggattacaggtgtgcaccaccacacttggcccctgaatcttttttttggcctttccaaggccactgactttgccagtcactgcaccttgttttccagaactgccactttgttttgtgttcatatcatgatggtggctattgatacccaataattggcaaggtgaagccactgaatcgtcggagaaggaggtttcggtggagtttgatcgctcttgtagtcattgaagaatacttttgtgttgtggggacttttgctttcctagaccagcagtccccaacctttttgacaccagggaccagtttcatagaagtcagtttttccatggaccgcaggggagagatggttcgggatgattcgagcgcattacatttattgtgcactttatttctatgattacattgtcatatataatgaaatcattatacaactcaccatcatgtagaatcagtgggagccctgagcttgttttcctgcaactagacggtcccatctgggggtgatgggagacagtgacagatcatcaggcattagattctcataaggagcacacagcctggatccctcttatgtgcagttcacagtagggttggtggttctataagagtctaatgccgcctctgatctgagaggaagcagagctcaggcagtaattggagtgatagggagtggctgtaaatacagatgaagcccactactcacctcctgctgtgcagtaccagtcggtggtttgagatgcctgcgctagaccacctcttaactgtgaggcaatgttgtaattgacaaggacaccctgtgttcatatatttgattcctcatggtctctaggttttaacacaaaattgcatagtcagctctcttgaaactacttagaaatgctcacttgacacatagtaagctccaataggaaatgactatcatgattgagcacagcagcatgtcttcagtcctagcactttgggaggccaaggcaggaggatcacttgaggccaggagttagagaccagcctggccaacatagtgagctcttgtctctacaaaaaaataattagctggccacagtgcgtgagtctgtagtcctagctactctggaggctgaggcaggaggatggcttgagcccaggacttcaagaatgcagtgtgctatgatcgtgctatggtactccagccttggcaacagagtaagaccctgtcacgaaagaaagaaagaaaatgaaaaccgtgaatatgcacatccataaaagataaactctttacttaatttaaatgttaaccaacacctgctatgccctcgtctattttggcatgacctggtgctttctggcaaatcattgatggcggactccaaaaataaaaagaatcgggcacggtggctaacgcctgtaatcccagcactttgggaggccaaggtggggggatcatgagatcaggagatcgagaccatcctggctaacgtggtgaatctccgtctctactaaaaatacaaaaaaaactagccaggcacagtggcaggcgcctgtagtcccagctactcagggggtgctgaggcaggagaatggtgtgaacccaagaggcggagcttgcagtgagccgagatcacgccactgcactctagcctgggcaacaaagcgagactccatctcaaaataaataaataaataaaaaataaaaagaatgtcaaaaataatggagaaaaatttaagcttgggaagaattccgttcacctgcttaattttttctccattcccaagtaggaaattggtttttgtgaagaaacacgtaggcccagtgtgttgactccattgataaatggcacgatctcattctgttaagtcactgggctgcgatccacactaagcttaccatgaaggtggagagagaaagctagcacatgtggcttcttccttgagttcttcatggaaaagatggggtgtgaaaaggcgggattgaggagggatgggtaacacacatgcactgaatataagatgaagcattgcagttgtgtcacatagacagtaagttcctgaggacctataaactccatccttcttgcatgtgcatcattgtatctccagcacattttctggtgcctggcacatagtagctgctcagtatttgttgaatcaatgaattattagagttatttatagaaaagaacctaccagggtcaggatggatggggtgggttatttgagagaggtggggctttataagcctcgaagaatggtttgctaaggtgagagaagggggcagggatggctttctagccaagaataataaaagcataaatgtaggggtgagaatgggtatgatgagtgtggcaggagctggtttagaggggttgactagtatactgtggcagggagctcagagccagagctcagccctttgctgcctcacaggagttgggaaaatgggagggactttctaagagatacttcacaacatggcaccctcccaagtggaagccaagccccttgagggtatgggaagagaagctgatatttaaaatatgtatcttatatctgcatatgcataaattatgtcatgtttattttttaaattctccccccctttttttttgaggcagagtctcgccctgccacccaggctggagtgcagcagcacgatctcagctcagtggtatgatttctgctcactgcaacctctgtctcctgggttcaagcaattcttgtgcctcagcctcctgagtagctgggactacaggcacacaccaccatgcctggctaatttttgtatttttagtagagatggggttttgccatgttggccaggctggtttcaaactcctgacctcaggtgatctgcccgcctcaacctcccaaagtgctgagattacaggcatgagccactgcgcccggccgtggtttgtttttggaaagatgttacatacaaattcaaaaggtgaacttctcccttcaacccttgtgcattagacccttagcttccctcccaagagacaattatggtttctagtgtatgaggttttctcctagagatatttttgcaagtataagcaaataggtatctattttcttccctaagatttccctacaaatactagcattccatatatatacagtcctatattttgccagaggatgttacatatcagtgcatgtaggaattccttgttcccttttttaaaaaattggtttttatttttgttaaaagtattcatgcagacggcttagagtcaagtaatttttgaaggcttattaagaaaaatagccatcctctgctacttctcaactcctttaattgattttttttttttttggtatttaccaccatatctctgaaaacaacacttgatcattgtgctgctatcttaattttgttttcaattttaggtatcatctattgactttcctccatgaaagatgaaatttagctcattcaccctctggatttgcccctatttcctcgttccaacacacatgcctcatatcagagtcccagtataattttatcttagttttgacaaactcagtgttcagagtttccattattatgactatgtaatgctatctagagtttacattattatgattatgtagatgttattcaaagctgagctttgcactgctttgtgactatttttcttctttctgtatgacttttctttttcctggagttagcaattgccttttttttccccaatcttgttttccatgtatttaaccaccaattctgccccaaaatctctttctaaatgtgttaatctccttttaatatgtccagacatgtattggatatcatattgatatcatctccttgaatgtgatctctactatagccttctgatctgccctggctttctctatagctagtaactgtcatataggatctttttcaccatccttgaaattccccttagtgctttcatagtggattccttgtttcccagttttcatgtcttcctctttcttgctttactctcctgcttaaatcaagcactttgtccagtagcttcccaagaaagaatgtacgtgatcttgaggcattgagaacttccatatctgagaggcttgatgcttctctaacacttaaaggatagtttagttgggtttaaaatttcaggcaagaaagttgttttcagaaagttataaataactttttttgcctgagctttttaaggcatttgtgttgttgccttctagtttcagttttgagaagatgaaacccaatctgattcgtatgtgtgtatgtttgtgagtgtgtgtgtgtgtgattatattcaccttcctggctgggaatattcttgatcctttgtacatgaccagtttttgtttttcctccttctctagaagcttttagactgtctttgtacccctattcaggatgatgggacttgctatgagtccatttttatttgttatcctggacacttagtggcccaattaatctataaacgtgtgtccacaaattctgggaaatgttgcaaattatttcattgatgctgtctttctccctgtgttctctgtttctttttcttagaagtctttttatttccataatggaattcctagaccaatcctataatttaaatctctttcttttgtcattttcatcactttaatgtttttaatggtattttctgggcacttacctcaacttttttccctaacccttccattgcgttttaaatttctggtatatattttattaaattccaaaaattctattttatttttaaatgtttctttcatatgacattctttttctgtggttgcaatatcctgtttctcagaggatatttaatgcagagtctatttcctccaagatacatattttcctaattgttttaacttctgtctgtcatattagtggatttcttcagatgtcttgggattcttggctatccattcatcttggatgctttagtacacaggataccaaattgttgatggaagctcagtgcttataggatgggcttgctgatgtgcttggctataatatgaaagcactgggctaccccattaggacacttctgtttcgtctttcagtcttttgttcatgggctaatctgattcttcagagaaggtttgtagaaaaatcttctgcctggaggttaaagatttgtctagcatcattttgagggtctagttgaaaagaagctgagggtttcaaaatgtgcagtgaaatttgtacattataccttccttctttcagtatggttcctggtgtccccccaggacggagaccctctgtttaaccctcaccagagactaaacccaccaccttctgtggggtgtgagaagggcagtcacttggcttcagggagtgtagaagatatgggaggggtctaacagtgccttatatttgacccagtccttatgtttttgtctcctccttgatcttttcttccagaggcccctggcattgccagtttctgaggtttggggcagaaatggggaattcggtgttgaaattaggtcgtttcccacctttcctcactgctcacctagacttttttcttggtacctttttttttttttttttttttttttttttttgagatggagtttcactctcgttgtccaggctggagtgcaatggcatgatcttggctcactgcaacctccacctcccgggttcaagtgattctcctgcctcagcctcccaagtagctgggattacaggcatccgccaccacacccggctaatttttgtattttaaatagagatggggttcaaccatgttggtcaggctggtcttgaactcccgaccttaggtgatccacccaactcggcctcccaaagtgctgggattacaggcgtgagccacggtgtctggactttttcttggtacttttcaacgcttatcccattttctgtcttccaagatggctttgctgttctcccctctctagttctttttaaactgcctcatgtatttttacactttttggtttgtttgtttttttttgggggatggagtttccctcttgtcgcgcaagctggagtgcacgatctctgctcactgcagcctccacctcccaggatcaagcgattctgcagcctcagcctcctgagtagctgggattacaggtgcatgccaccatgcccagctaatttctgtatttttagtagagacgggttggccaggctcgtctcgagctcctgacctcaggtgatccactcacctcagcctcccaaagtgctgggattacaggcgtgaaccaccacgcccggcctttttacacttttttttttttgccttttcccccctcttttgtgtggagaatggggtcttgttatattttccaggcaggtcttgaactcctgggctccagctttcctcatgcctgtgccttcctaagagctgggattccaggcatgagccaccatgcccggctaaactggttcatgtatttttggaaagtcttttacagttattttagtaaggtttaggaaggaagagagctaaatgcatgcactcagcctaccatcttctcatgggaattctctcatgccttcttttacaaagaagtgataataataatcatggatttttattatatgcttcctataaagctcagggctttacagaaatattctcagttaatctttaccacaaacctacaaggtggacaggaccagattaggaattttaaaattaagccctgaaactattaaggtgcaggcatatgtcataaaaaaaaattaaattataaagtaaagaaggctgacaaaattgtttttgtttttgctttttttagagacagggtcttgctctgttgcccaggctggagtgtaatggtgcgattgtaactcactgcagcctcaaactcctgggttcagcaatcctgcctcagcttcccaagtagctgagactacagagatgtaccaccatgctcagctaattaaaaaaaaacaactgttttttgtttgtttgttttgagacagagtttcacccctgtcacccaggctggagtgcaatggcacgatctcagctcactgcaacctccacctcctgggttcaagtgattctcctgcctcagcctcctgagtagctgggattacaggcacatgccaccatgcccagctaatttttgtacttttagtagagatggtgtttcaccgtgttgaccagactggtcttgaactcctgacctcaggtgatccacccaccttggccttccaaagtgctgggattacaggcatgagccaccgtgcccagtcttttttatttttgagacaggttctcactttgtcacccaggctagagtgcagtggcacaaacacggctcactgcaggcttgacctcctaggctccagtgatcttctcacctcagctccccaagtagctgggactgcagccatgcaccaccacacccggctaatttttgtattttttgtggagacgggatttcaccatgttgcccaggctggtcttgaactcctgagctcaagtgatccacctgcctaggcttctcaaagtgctgggattacaggtgtgagcccactgtgcctagtgaaaaaactttttttttttttttttttttttttttttttagagataagatcttactgtgttgcccaggctggtctctcattcctggcctcaagtgatcctcctgccttgacctcccaaagtgctgggattatgggtatgagccaccgtgcccagcctaaagttgctatttttcccatgatgtttatcttcgtggtgcttatgaaatggcaactatggcattcttccttctcgtgcatgcctgtgtgggtgtgccctcagcatatgcttacaaggtttattgggtgatccaacgctagccgcaagagctattattagctcccttttacagctgggaaaacagactcagaggagtggagaacttgctgcagatttgttaagtgtcagagccaaatatacacttggattatcctgactccaaagccggagccctgctggtcagtcggtgacaccgggcaaccacagggatccccctcaatcccacggaaggctgtctactgtcttcatctcagagtgttgacagctcaaagcttaggaggctggagctaagttcaataaatgaacgtgatgaataggagaaaagcgccattaaagccctccagacaagaaccactttggagcccctccatgggtccctggggtgtaggaggggcaggaaagcagataagattccattctgagcctctgcacttgccctatgcaagatagccacaagtaatgttttgtcctcacctcattagcaacaaatggccacactcaggggattaaaaaaagaaataacagccagcctttatcagcttggggctcttggctaattcctctttaagcttaagacaactctgcgggtggagtgatccaaacgactttctccactttgcaagttcccacactcggctgtatccttctgcttgagattggcagccccctggggatggttcctgctcacccaactcccctgaggctgctccccagtagaggcagagagaggaagggcactgatgtcctcagggcccctgcaataggtcaggacctgggttcactgctccatcaatcccacattgctcggccctcactagcaccacacagggtgggtggcagcctccccatttgatcaatggggaaaactcagcacacctacttggccccagaactgagagtcaaacctggggacccagcttcgctgccctcagaatgttactcttccctcctgggtagcgtggtatagatagtgtagtattcttgtccccatataacggaagaggaaactgaggcccccagaaggctaagggactagcataggccttgtgtcttagcctgttaaggctgctatatcaaaataccatagactgggtggcttttaaacagatatttgtttctcgtggttctggaggctgggaagtccaagatcaagcttggtatctggtgagggcctagtgctgccttctcgctgtgtctcacatggtggaagggacctgctagctctctgggtctctcccccaatgaggattgaacccccatgatctcatcacctcccaaaggccccacctcctaatatcatcactttaggggtaaggattccagcatatgaatttgagggagacatgagcattcagaccatgacaccttgtaatcagaaaggggttaaatatctttggttgaatatcctgtcctgccgattcagaatcactgctgtctataacctcttccctagatcactgttttagatgatgatgataaagatgatattaacggcaattaccaagctcttaaatgtgctgtgggtaaaacaattttaagctctttctgaatccagtctctttcaatcatcttcatgcccttgaaaggtctggatttttgtcgatttccctggtgaggaaacgggccctgggggcagaggtgatagggtggagccaagaagtaattcccagctgtttctctgcagaggcagtgctgctacaaacacatctccaggaaggggtacagccaaatgcttctctgtctcttgtgggttttgcagtggctgtcagctatgtgtctggcccggttgggaatgatgggggactgtgtgtgggaatgaatggctctgtctggctggctcagtctttacagaggtgctaggagtgtctgtttggtgctctgactaatcatgaaaagttcacgtttttatctttattttatttttatttttggtacccatggtgcattacagggaagggagacagcaaaggagaattatttgttataaaatagtaaatattggccaggcacagtggttcacacctgtaatctcagcactttgggaggcagaggcaggcagatcatctgaggtcaggagttcgagaccagcctggccaatgtagtgaaaccccatctctactaaaaatacaaaaaattagccaggcatggtggtgggcgactataatcccagctactcgggaggctgaggcaggagaatcgcttgaacctgggaggtagaggttgcagtgagccgagattgccccactgcactccagcctgggcaacaagagcaaaactccgtctcaaaaaaaaacaaaaacaaaaacaaaaaccgtaaatattaaattgaaaaagggacatacttaagggagtgaacctgaaaagccccagctgacacttggcaacaccttccttgtttgttttgggcttttttgagacagagtctcactctgttgcccaggctggagtgtagtggtgtgatctcggctcacctgagcctcagcctctccaggctcaggtgatcctcccacctcagcctccagagtagctgcatacaggcatgcaccagtacaactggctaatttttgtattttttgtagagatgaggttttgctatgttgttcaggctggccttgaactcctgagcccaagcaatccacctacctcggcctcccaaagtgctgggattataggcgtgacccacagtgcctggccagcaccttccttgttaaattgcatgtgtcagccacctccctcggtgtcctcccagcctctgggcagtctggctccccattcctttctttatccaacagcatttttttgtgagacaaggccttgccctgttgcccaggctggagtggagtggcacactcatagctcactccagcctccaactcctgggctcaagtgatcctcccctctcagcctcccaagtagctgggaccacaggcacagatcatcacgcctggctaattttttgattttttgtagagatgaggtctcattatgttgcccaggctggtctcgaactcctggcctcaagcaatcctcccgcctcggtctcccaaagtgctggaattacagatgtgatccaccacgcccggtcattctaacaatattgattattagatgttgccctagacacagcctactgtgcgtatgtgtaaatacgaattgaatcatcccacaagtagctgctaagtagaggaggtccagagagtggggaagtgtagccctggggaccttgggaggacaggggaggcttccttggaaggtgaagtgtaggcttggctagggaacttgatataggttctatgaggctgctggggctggagcagagagaagggggagaatgtaggaggtaggagtggaggcccaagagggagagcgttggttttcctgtctcctacaccccttcactggccagttctgctttcatgtttttatttattatatattttttgagacagagtttcactctttcacccaagctagagcgcagtggcacaataatagctccctgtaacctcgaactcctaggctcaagcaattttcctgcctcagccttccaaatagctggggctacaggcacacacctctgtccacagctaattaaaaaaaatttttttttcatagagataggggtctcgctttgagtctcaaactcctcgcctcaagcaatccttctgcctcagcctcccaaagcactgggattacaggcatgagctcctatgcccagcccagttctgcttttacaataccagggcttcctgtaggtttggaaaacacctgttgggttgcagcaaaggctctcaaagtatctcttcttactcagcatgtcatcctaaccaactctgccgggagagtagagtggggagatgaaggctggagaaagagaagggccctcacttacagaatggcttaggtcatgggctctggagctgggttcacctcccagctctgccccggctattactttgtgcctcagtttcctcacttgtcccgtgaggatgatgactgtgcttactccagttgttacaagggtgattcggtcagtgtgtagggacacggtgcatggacaggacaagttcaacaggcattagcagtcagctgccgaggacccaccgtcaagggccatgcagtggccaccttcacagtcacaccacagaagatccagaacctctggcatctgcctccgtgcggggcattaggtagagagccacttttctgcaggcaatggaggctgagacctttcttctttactagcccaggggtattgatggccctgcagagacgggttttgattacctctcactggatcccccagcagcctgttaccagaaagaagggcagacgcagggagcctgggtctgtgctcagtccccgctgggttttctccttttatggtcagcctacagtgctctggcttcccagacagaatccaccagcttgtgtttgggcttgggccgaaatagctggtctgtggggagctgggtacctcctgggagtcctcaggcccacagcgggggaggaaccgctgaagccctttatcttctcaggaaacgtgcctggggccttacacatccgaggctgggtggggagtctggggaggaggaagggagagaggcatgtttaaggatggggtgtgaggtgacatgagccccagggatctgggctgggaagctcagccccaggcgggtcctgatgatggccggccgcccccagctccagccttcccagactccacggaggctcggtactgtgtccccgcccactttggagcttctgtcccaggccctctgcttgggatgctctgcctcgacctctccccaggagattctttcacatttttcttaatgctgttcagtggtcacctctgccgtgaaggcttcctgtcttgctcaggtcagtgtgaaaaaacaaacaaacaaaaaacctgacgtctatagcacttgggttcacatccatcgtagcactgctcatctcttacggtcatttctttgcccatctgactcccaccctgggtcatgaacttctcaaaagcaaggataagcaagtcatgaagctcggtgcattggcttgagcctgtgatttcagttacttgggaggccaaggcgggaggatcacttgaggccaggagtttgggaccagcctgggtaatattactaagttaccttactaggccctgtctctacaaaaaaaatgaaaacaaaaaacaaaaaaaccattagccaggcgtagtggcatgcacctgtagtcccagctgctcaggaggctgagatggaaggatctgttagcccaggagttccagactgcagttagctatgatcgtgctactgcacttcagcctgggcatcagagtgacacctcatctcttaaaaaagaaaagaaaaaaaaaagcagatcttattgacttttgtgctttcggtacctggctcaggactcgtttgttgaatgaatatgtgaacacgtgaatatgcattttccattgcttctaccttggttgcctctctgagccagagagcaattcaaaataacaagcatttcctgagcacctactgtgtgtcaggcattgttccttgtaccttcaggagctcattggttcaggggaaaagcattgaaaatgaacaattttgtaattgttggaaacctaatagagctgcatgaagtggaagaagtcagatttataatcattcagaggtggtataaaatgaacatcatttttaaaaaaggtttatgcggtataatttaaataaattcattttaaggatacagttcacacctaaaattgcagctatgtctgcataactgtctaaattcactcataatttacatggttatgcagccattgctgcaatataattttatatttctatcatcccccaaagaaatcttgtgcacatttttttgtcactccatattcctacccgcagctcctggcagccacgaattcacaaatctactttctgtctctatggatttgcctattctggacatttcatataaatggaatcatatgtgaccttttgtggctggcttcttttttttttttttttttttttttttttttttttttgagacagagtgtctcactgcactcgcccgggctggagtgcagtgatgtggtctcggctcaccacaaactctgcctcctgggttcaagtgattctcctgcctcagcctcccgagtagctgggactataggcacgtgccaccacacctggctaatttttgtatttttagtagagacggggtttcactgtattggccaggctggtcttgaactcctgacctcgtgatctgcccacctcagcctcccaaagtgctgggattacaggtgtgagccaccgtgcccagccggctagcttctttcacttagtataatgttgtcaaggttcatccacgttgtatcatggattcatactatttatatattttttaagacagggtctgtctctgtcaccccagctggagtaccgtggtgcagtcgtggcttactacaacctccacctcctgggctcaagccattgtcccacctcagcctcttgagtagctgagaccacagggattgtgccactatgcccagctaatgtttgcatttttttttgtagagatagggtttcaccatgttgcccaggctggtttcggactcccgggctcaagcaatccacctgcctcagcttcccaaagtgctggaatttcaggcatgagccatggccgccggccataacatcctttcttttcatggctgaatactatcccactgtctgggtagaccacattttgtttatccatctacccattgatgaacatttggttgtttctattttttggatattatgaataaagtccataatttttaccaatatggaaaagaaaaacaagaaaaactctgaatgccatatcatggatagatggcctattatcattccatatcatctgtacctttttccgccagaatgttttgagacatttattaagtaaggatcacaatgatgataattactaaaatggagagaacctgtggaccatgggaaccactaggccatgtgacactcatgtttatattagagaaaggcaccgttttctcaaagcacttttcctccatctgctgaaagattattacaataaatacacaatgcaatacaataaatgaccaatgcaaatagtttctccatagagttatgcagtgtacaacatgcaccacggtccatggccatcctgcaggtaggaggtcaagtggaaaggtctccaactcagctctagaaaagtgcagagttagagaaggtatcatagaagagttgactcccaagacgatgtttcagatacagattagggtatgtacccgaagaattgaaaaggtactcaaactaaaacttgtacaggaatgttcatagcagcactatgcagaatagccaaaaggtggaaataacccaaatgtccgtcaactgttgaatggataaacaaaatatgatccatccgtacaatgtgatatgactcagccacaaataggcataaagtctgggacctgctacaacatggatgaacttcagccacatgctgagtgaaagaagtcagacatgaaaggccgcacatgttataattccatttatgcaaaaatatctagaataggtaagaccatagagacagaaagcaaattggcggttgcaagggcttatgggggagtggctgcttaacgggtagagggtttcatttgggggtgacagaatattttagaactagataaaggtggtagttacgtaacattgtgaatgtactaaatgctcctgaattatgcactttagttatttttttatctttattactattttttgagatggagtctccctctgtcacccaggctggagtgcagtggcgcgatctcagctcactgcaaactccacctccctggttcacgcgattctcctgcctcagcctcctgagtagctgggattacaggtgtgcaccaccgcgcccagctaatttttgtatttttggtagagacggggttttgccgtgttggtctcaaactcccgactttaggagatccagctgtgtcggcctcccaaagtgctgggattacaggcataagccaccgcacctggcttgaattattcactttaaaatggttctttttatgtagtgtaaattttacctcaatggaaggaaaaaagagagagagagagagaatggattaggccagagaagaagtggtggtgggtgcactgggcagaagaaatcacttgtgcaaagcaaggagggagtgaaactgctttgtacggtggagaacactgcttttgagtccaacacaagctcaggcttggggaaggaatcagataaaaatttccaggatctcagagttccctgtgctccacacgggttggcagacagcacccacatggagtccttctgctcgtaaccagcaccctgcaagcttcccacgcctggaagtggtgtgtttttgatgggaacgtcaggccagaggtctcccagcagcccccagctcggagccgcgctggcagctcccaggccttctcctggagcccgctccctctcctgggggccctgtgagcatctgagcctataaatctctcctgctctgggcctaggattcacaaggctgccaggaaagcctgcctctctccctgaagtagtggatcaacacagcccatctgtctgtccatctcaaaatctttccttaagatagtggaggttgtctgggccggtcccaggaggttctctctgtctgggttctaatcacagggtacctggttcttctatccttcaccctcttttaaaaaatcactttttagtactttgggaggctgaggcgggcggatcacctgaggtcaggagttcgagaccagcctggccaacatggtgaaaccccgtctctacaaaaaatagaaaaattagccaggcgtggtggcacgcacctgtagtcccagctactcggggggccgaggtggaagaattgcttgaaaccaggaggcagaggttgcagtgagccaagatcgagccactgcactccagcctgggtgacagagcgagactccatttcagaaaaaaaaaaaaaattaaactggtttcccattttgctctgtcctcgagtgaatttctccccctgggtggaagctaaaggcacgggtatctgtctgtctccagagtataatggagagattaaagtttgattgcttttttcctgctttttttttctttgagatggggtcttgctctgttgcccaggctggagtgcagtggcaaaatctcaactcactgcaacctccacctcctgggttcaagtgattctcctgccttagcctcccgagtagctgggactacaggtgcctgccgccatgcctggctaattttttgtatttttagtagagatgggtttcaccatgttgcccaggctggtctcgaactcctgacctcaggtgatccacccacgtgctgggattacaggtgtgagccaccacgcccggcctcctttctcttataaatagggacaccattgatttaggtctcactccaagccaggatgacctcatctcaacatccttcccttaattacatctgcaagacccttattctaaataaaatcacaggtgggatacagtggctcacgcctgtaatcccagcactttgggaggctgaggcaggtgggtcacttgagcccaagagtgtgaaaccagcctgggcaacatagcaagacccaatctctacaaaaaatacaaaaattagccgggcatgctggcatgtgcctatagtcccagctacaggggaggccgaagagggaggattgcttgagcctgggaggttgaggttgcagtgagctgagatcacgccactgtacacccacctgggcgacaaagtgagaccccatctcaatcaattggttagtcaataacatcgcagtctgaggttctgagtgaacatagcttttgggagtcacagttcaacccaccctagtgaccttgggcaagttgcctcacttctgaacctcactctccttatttgtaaaatggaggcaatgccagtgcccaccccaggagctgctgagagaattcagtgggtcacttcaacacagaagttcagcatacgcctgcagtgcagtgagtgctcgggagatcggagctgttagtgggatcctaatgcggtggctctttcttttctgtctttttttagctttgtggtcatgatggtttcataaagaacaataccgactctttttctattgaccatttttggtgggatgaggaaaagattgtatgtgttcatagcacaaacataaccaggatagaagtagaatgggtgaaagtaggtcttcctcctgtcccttttctcaatacttcaggctcaggcctgtttgttggttttttttgtttgttttgttttgtttttggagtctcgctctgttgcccaggctggagtgtagtggcatgatctcacctcactgcaacctccacctcctgggttgaagtgattctcctgcctcagcctccggagtaccttggattacaggtgcatgctaccatgcccagctaatttttgtatttttagtagagacagcgtttcaccatgttggccaggctggtcttgaactcctgacctcaagtgatctgcccgcctcagccttccgaagtgctgggattacaagtgtgagccaccgcacccatcccaggtctgtttttagagatagggtctcactccattgcccaggctggagtgcagtggtgtaatcacagctcactgcaaccttgaactccttggctcaagggatcctactgtctcagcctcccaagtagctgggacaaggggtatgtctatcacacatagctaattaaaaaaaaatttttttttgtagagactgggtcttgctatgttgtccaggctggtctggaactcctggcctcaagtgatcctcccatctcagcctcccaaagtgttgagattacaggcatgaaccactgcatcctacctatatatctgtctttttaaaacacaaaaggtataacactatgctacctcatcttttatttttagcttaatatattttggatatttttctgtgtccatccacaaagctctgcctggttcttttcaatggctgcctattttatttatgtatttatatcttatttgtttttgaaacagagtcttgctctgttgcccagcctggcatgcagtggcacgatctcggctcactgcaacgtccgcctcctgagttcaagcaattttcctgcctcagccttctgagtagctgggattacaagcgtgtgccatgacacccaactaatttttgtatttttagtggagatggggtttcaccatgttagccaggctggtctggaactcctgaactcaagtgatccaccctccttggcctcccaaagtggtgagattacaggcatgagccactgcgcccggcctgcctatttttaaatgtgccattatataaacacaccagaattgaaaccccagagctgactagtctttaggccttttgtcttgaggatttcgttcaaccaggccacccaaacatccatctataatccgagggaagagagagagaactgattggagttgggcatagaatctgaggaacgtgcccacatccaatcagttctctcttaagattacagatggaagaaagagtcatctctttcaccttgccttcttcagtcccatccatcctcccattcatattcccatccatccatccatccatccatccatccatccatccatccatccaactcatttaccggcctatacactctgtcctccctcccattcacccacccatccactctctcatccactcactcatccttccctcctccgtccaaccatccgtccaaccagctatatacccacccatctacccatctacacacccttccctcctttcttctttctttcttcctatctatccatccatccttccttctttccatccatctattcgtccacctacccacccacccactcatccatttgtcttcctgtctctctacctgtccatctatccatccttccatccagccatctgtctgcctattcacccagcctcccatccatttatcctcccgtccatttacctatccatccattcttccatccacccatcctttcttccttccttctttcctttcttccttccttccactcacttgcccatccacctcttcttccatcctcccatccatctactcatctatccatccattttcccacccatctgcccatccacccacccacctactcacctactcatctgcttatccaccctcccgtccatctgtctattcatccacccacccacccatccatctacctacccatctacccacccttccattcacccatctacccttccttcctttcttccttccttccgtccactcatcttcccatccatctactcatccatccctcaatccatccatctaacaagcataattcagcacctaccatctatgtgccagtactagagatacaatgtaaaaccaagcctaggagatttttgatgaaatgaagcttgtgagagctgagcactgaactagtaggactgaagccagggagtggatttaagaaatgcttgccactgtggcattgtctaccagcagatatgatgctgggatttctacattgttaggtgaccattgaacgtattggtaactgttctcagatctctctttgggaaggaaatgggtcttcagagcctggctccacctcagaggcctctttaagagtagaaggtgatggataatgtctgcttaatcacatctagttctttgatgacctctgtatcttttgggtttctctggtggtaaacaagagagactgactctgtcatctagtagaggaaagggatttgtaggggagtatggaggagctcacagttgcagtgggaacactaggaatcaggctaggtaaatgacagaaactgggctgcttgggcccaggggcagaaaggaagtctgcctcagggctctgtccacctgctgtgcttccctgtccttgactgagcttggagttttaggccagagagtctgaccaatgcagcctggaacacattcttacctctttgttgaaggtacttatgaggcagtcccactaagactgtacatgacggtaggggtgatgggggaaacctcaaggaccacaggatgcttctggaagaagaggaaatggatgctggatttacaaaaaaacacaaatgtgcacaatactatattacagatgaaggaactgaggcatggagtttaagaatatttgcccaaggccacagagcggagaagtggctaagggggaccccaatctgtatagatccaacatctgcgtttggtccctaacctaatctgggtggggtgggcctcccgggacacctccagagctgatgtggctggatgctaatgactcctggatcagtcaggctccagcatctttctggggctgcctctgggactttggggctgcccttttggctttggtcgtggcccctgtagcctgggcaatgagcccagctgacctgttgtcacttccaatgaggccagcatggagaagctttagaatgggagggccctgggaggagccaagtccagacccttagctcagagctcattttaattcatggctcttttttcttctttctgtttgcagatcgggaggaccagtccattctatgcacgtaagtggaactgctttttcttctgttttttttttgtttttttttttttttaatctgtagtcgagatccaacctatgaaagaaaagatccatgagtgcagagatctttgatttgttcatggttccaagtgcctctctttatacctggcaccatgtagatgctcactaaacatttgtgatatatggtcttctgcggaggcaggcaaacttaaactcttaatgacacctgctatcatttggttccatacctctcctccttctaaaaaactagcatttattgaacatgtactctgtgccaggacttgaactaaagattttatatgcagaatcttatctaattgcataacagccatctgtgttgatagggaagatgttaaactgtcactttagtatttcacatttatcaagccacaaacacatcagtgccatatttggtgattggtatcactgtttctttgaagacctaggtacataggcagaagatagtaactcaattttagaatcattgagagagttttcactattgtatttatatgcaagtaacatatattaatatatattgttgattcattgacattgaactcacagccagcagctctgtggctgatgcctggatgaagtttatctgatgtgtatttattacataatgggtatcacaactttattgtgcttggaaacatgagccaacacttgagcactatgctggggacatttttgtatgtgtgctgccgaagggagcacatctgaggggacattttaaactgcaaaataactaacaaaaagccacaaaaatacaaaaaaaggtggcactaaatacactacagaaaggacacttgtttacagtatgagagttgaaactagaaggtagagcattcccctgttcaacctgagctgggaacgtgtgcattgggggaatcgaattttccttactctgcacatgttcacaaatgactacaaaagtgccatgaatattgattttggggttacaaataactttcagcaggtcggtgaatttgaaaatatagaatatataaataatgaggatagactgtgcatatatatatttacataatatataatatgtattatatttaatatatttatatttatatatatatatatttgaaggtctggaagcaactaaagctataatcaacagaggttatttaaataaaatatagcatttccaggtagccactacaaagagtgaggctgatctatttatgctgagagagaacgctctttatagataataccgttgagtggaaaacacaggggcaaaccagcatatgcataatgtaaccgtgtgtgtctttaaaaagagcaggattgcatggacgtgcatatgtttcctatttgcatgaaattatctggaaggacaattaaaaactagtaattagaatttcagatggtgatggatggtaggatggcaatgaactgtattgagagaagattgaaacaattaataagtttggggttgatatagatagaaaacctggaaacaataaaacaaaggcaattataaactccaggaaaaaacaaaagttgggatggaaggagaagtaatcacattggactaaggagcccagctgtgcaagtttggagtatttatctaaccagaataactccctgtgatggacttggctctgtggggaaagggaagaggattagatgggaactgaattctcatattccatggtaggatgtacacatttgatgtttgacaatgaatagtctggatctagagatataatgctacctagctatgaggatataaatgctaaaacaacctgccgacttggtttcctagttttctggcttctaggggtcacctgcattccttggctcatggtctcttcctccatctttaaatcctgcagcatggtatcttcaaatctctttctctggtccccctacctctctcttataaggcccagtacctttgtggttatattagccccacctagatgatccaagacagtctcctcatctcaagcaaacatattcacagattctgaggataggccatggacattcttgtgggggctgtttttcagctagccacagaggcatttgatcccctaggagccaaacccatgtgtgagccacatgtcatctccccaggaaccaaaatagtgtagctcaactgccctctgttgagtgaatgaattaagtgtggtaacagagaggtgcaggaaagagtaggactttcagatggcttcctagctatgtagctatgcacgggtcacttgacctctctgagctgagcttatggagaggctgtgaagatgaagaagaggccaccctgctctcatttccagcacccatgccatcagcaggtgctgtttcatctaaaacggtgctatccaaaagaactttgtgatgagcacaaagttcacttaaaagttcacttaattgagctcttaaaaagtggcaagtatattgcagaactgaatttttaagattttagttaatttagatagcggttcctgccttggacggtatgatgctgaaatatttctcatctctgtccattcctctgactccaccgcctcttcctagttcagggtcccgtcacctctcaccagggcctctgtagcagtctcttaagctccctgctcccattgcttgcttgcttccttcctttaataaatatacattataagaatattcactcattattcattgaataaatattcattagcatgctgtcataaagtgtggattccagaacctaaccccttgggtttgaattctggccccatcatcgtctagttagttgtatgctccaggaaataagtcagttcacttctctgagcctcagtttccccatctgtaaaatgggaacaataagcaccccattgggttgttggaaggatgaaatgagtcactacatgtgaagaactgagaaacaggccactgccccatggtgagcactttgtaaggatcagctgctattgtagtgaaagtgctcactattttttaaaaatccttcctgcaatccagtatccatcttgcagtttgtttgtttgtttgtttgtttgtttttgagatggagttttgctctcattgcccaggctagagtgcaatggcgtgatcttggctcacagcaacctccacctcccaggttcaagtgattctcctgcctcagcctcccgagtagctgggataacaggcatgtaccaccatgcctggctaattttgtatttttagtagagacagggttttgtcatgttggtcaggctggtctcgaactcctgacctcaggtgacccggggagcctcggcctcccaagtgctgggattacaggcatgagccgctgagcctggcccatcctgcagtttgttgttgttgttgatttttttgttgagacagagtctcactctgttgcccaggctggagtgcagtggtgcgatcttggctcactgcaacccccgcctcctgggttcaagcaattctcctgcctcagcttcccgagtattatgccatcatgcccagctaatttttgtattgttaatagagatgggttttctccatgttggccagcctggtctcaaactcctgatctcaggtgatccacccacctcagtcagcctcccaaagtgctgggattacaggcatgagccacttcgcccagcccatcctgcagttctgattctccccacactggttctaaagtcccgttcccctcgtgaaatggtttcctgcacccatgagaataaaactcagattccttactgtgacttggaagactgagtgtgatctgctcttccctcttcacttcctgctgtcctcctctgttgtggccctccagccatgctgggagccattctgtctcatacctgggcccagcatttccctcccttggacctctgtccatactgtttgccctgcctggcccacccttccctccatccttcccacagggctctcttgtaactttcaaggctcagcaactccctggcttccccatccacagcctcccctctcctcccttcccctcgatcttctcagtcacatcacccagatgtagcaatgatatctccaccacgaactatcttgattatttgtttacttggctattgtgtatctccatctcctggaatgcagcgttagcaaggacttggcacactgcccacacacagccagtgctggagaaggaggccttagccattgttaggaaggaaatcccaaaacgatcagacttttatttgcaaatgcatccagtcagcccagaaccaccaacatcttcagtctctgtattcaattttattttgcttgttgtgaaattcagccaaagtgacttgaaggacctacaagttgacagcagggctgagcttttacgcgtagttggtgcttaagagaagccaggctggagccaactgtttggttatgcagttaagaaactgaaaattggccgcgcactgtggctcaggcctgtaatcccagcactttgggaggccgaggcgggcggatcacgaggtcaggagttcgagaccatcctggctaacacggtgaaaccccatctctactaaaaaaatacaaaaaaattagctgggcatggtggcgggtgcctgtagtcccagctattcaggaggctgaggcaggagaatggtgtgaacctggggggcggggcttgcagttagcagagatcgcaccactgcactccagcctgggtgacagagcgagactctgtctcaaaaaaaaaaaaaaaagaaaagaaaagaaactgaaaattggccacgcaccgtggctcacgcctgtaatcccagcactttgggaggccgaggcgggtggatcacgaggtcaggagttcgagaccatcctggctaacacggtgaaaccccatctctactaaaaaaaatacaaaaaaattagccgggcatggtggcgggtgcctgtagtcccagctattcaggaggctgaggcaggagaatggcgtgaacctggggggcggagcttgcagtgagctgagatcacgccagtgcactccagcctgggtgacagagcgagactctgtctcaaaaaaaaaaaaaaaaaaaaaagaaaagaaaagaaactgaaaattggctgggtgtggtggcttatgcctggaaactcagggccttgagaggccgaggcgggagggtggctggaagccagaagtttgagaccaaactgaggaacacagtaagaccccattactacaaaaaatttaaaaattagctaggtgggatggtgcatgcctgtagtcccagctactcaggaggttggggagggaggatcacttgagcttgggagttagaggctaagtgagctatgatggcaccactgcacctcagcctgggcaacagagcaagacccagagacaggaaggaaggaaaggaagggaaggaagacaagaaaggaaggaaactgaaagctgaataaatgtaatttttaggcctgagttgtattttgtctagcatgtaatccatccagtataatcagtttaattagaggccatgggcctggctggagatagagctgtgtgatcagggggctaaagtaagaggaggagggtggtttcacataaaattagagagaggtaagggggtgcttccaggccctggggaggagtttaaactttcgtctaaaatggatgacaggctgggcatggtggctcatgcctgtaatcctagcacttcgggaggccaaggcaggctgatcgcttgagctcaggagttcaagaccagcctggccaacatggccaaaccccctctctacaaaaacaaaaattagctgagcgtgatggcatgtgcctgtagtcccagctacttaggaggatgaggcaggaggatctcggttcactgagcctgggaggcagaaagttggcactgagccaagactgcaccactgcacttcagcctgggtgacacagtgagaccccatctcaaaaaatatatataacaataaaataaataaatgaaatggatgagaacgtgctaagggactcaagccaaggaaggacaaagtttaaccagtgggtcaaatcaggcccttgtctgtctgttccagataaagttttattgaaacacagccgcacccacttgtttacgtatttgcttttgtgctgcagtggagagctgagcagatgtgacaaagaatgcgtgaccctcaaagtctaaaatatttactgtctgaccttttacaaaaagagtttgctaactcctagcttaaacagtgggaaaatgtgaatattatttatattgtaatgataggatgaatgctgaaaatcattatacaaacaatatataacttctgtggaagcagtggttataaaagtaataataggtgggcacagtggctcacacctgtaatcccaacactttagggggccgaggcaggaggattgcctgaggcctggagttcaagactatcctgggcaacttagcgagaccccacaaaatcaaaaaattagctaggtgtagtggcacatgcctgtcatcccagctactcaggaggctgaggtgggagggtcacttgaacccaggagttcgagattgcagtgagtcaagattgtgccactgcactccggcctgagcaagaagcaaaactctgtctcaaaaaacaaaagtaataataactaacattttggcataccaggcattgttctaagcattttatataaatgttcactcatttaatcctcataagaatcatataaaaggtcaggcatggtggctcatgcctgtagtcccagcactttgggaggctgaggctagagatcacttgagaccaggagttcgagaccagcttgagcaacatagcgagacccctgtctctacagaaaatttaaaaatcagccagctgtggtggtgtgcacctgtagtcccagctacctgggagattggggcaggagtatcacttgagcctaggaattctcagctgcagtgagctatgattgcatcactgcactccagcctgggccacagagtgagatcttgtctcaaaaaaaaaaaaaaaaaaatcatacaaggtaagtgtttttattatacccattttataatggggtaaagaaactgaggtatggagaggctaaatgacttgcctaaggtcacccaggtaactggcagaggagggatttgaacttgagcaacctggtcctggagcccattatgctattctgccaattgatgctataggggagagaggcgttgcttctgcctggggttttgcaggacgtgtaggagttgtacagtacaaaatgccagggtgctttgccagtcacataaagaccagggactgaatagctgtgaggttcatcagagacaatttggctttcctaccagtggcaaaccacaggctgcaatggacttggcaatattcgaccctgggagccaggaccagctgcagaatttgtagaattttgcaaaatgaaaatgctggctgagtgcagtgactcacacctggaatcccagcactttgggaggctgaggcgggcagatcacatgaggtcaggagttcgaggccagcctcgccaacatggtgaaatcccatctctactaaaaatataaaaattacccaggcatagtggcgggcacctgtagttccagctacttgggaggttgaggcaggagaatcacttgaacctgggaggtagaggttgcagtgagccgccatcacacactgcactccagcctgggcaatagagcaagagtcagtctcaaaaaaaaaaaaaaaaaaagaaaagaaaaaaaatgcagagcgtttataaagaattaggaagaatttccagatggcaacattagagtatgaagcacagggtggtccctgtgagacggtacaggtcacactcatgaagccagcctggctgggggattaagtggccattgggtggttcttcccagctgctggggctggactgattaaaaggacttggcactggggtagttacaaggccaggaggccataacgtggtcatgagtctggtccttctccgggaagagggagctcagtaccaaattccccaagaaataagaaaggagtttagggtgctcagaccaggaaggcatcttcacccctagaggtcaggggtcagaaaagccaagctatgaatgtttctagaaccagctctaagcacatcaaccttcagacgcccacgagcctggagcttgggatgttttctttggcagaacctcccagggcaatttatttttctcaacagaacttggaaacagtggagcccagcagcaacatgggaaggggtagatgcccagagtttatgtcccactccccatcccaggcaaagtgggagaccatagccacggatagggcacattgatgtctttgtttttttttttgtctgtctgtttgtttgtttgtttgtttgttttttgagatggagtctcattctattgcccaggctggagtgcagtggcacgagctcagctcactgtaatctccgcctcctgggttcaagggattctcctgcctcagctccccaagtagctgggactacaggcacccaccaccatgcccagctactttttgtatttttagtagagacagggtttcaccatgttggccaggctggtcttgaactcctgacctcaagtgatccacccgcctcagcctcccaaagtaccgggatgacaggcgtgagccaccacacccggtgatgtctttgttgtaaaagggaggaggtgagagaggttcaaggccagggtggaaaggaaggaactattgtgggaaaggagaagtgagcagcagcagtctaggagcactggtttgtcagcatgaagagtgtgatccacacatgttgtttgtgcacactgctgtcctgattcttgtcttggatctgaataggttcatgaccacctacgcaagtggtttcctacatccaaaaatttctctcctttctcttgctttaatcagaatccaaccccttcactttagaatgaagtcaagcaaggttctgacgttagcctgattgaagtaattcatacttaggtgtgaatgactgagtggcttggttcattgattggggcaagtaaagcctcctggaatatatggcagaattccagtggagtggggctgggacttcactctgtcttttctctttgctgatttgttaaaataaaagggtaggaggcagaacatgggccctggtgtcaagtggacctacgttcaaatcctgcttctcctccatttcctatctgtgtgaaagcaggagcaattgtgggctggagcaatttacttcaaacctctctttgcctcagtttccccggatgggtgatggggataattaataactctctcattagattgctgggtagagtaaatgaaaagatctgtgagcccaaagcctagtactgtgcaggccttcaacaaatatcaattccccttcccctgcccttcttctggccttagaaagcaagtccctagagggttgggcctgtgtcatggaacaacttggtgaaatgtagtaaaaggaattctgactgcattagaatcagagacctgactttccattctgactgtatcccttctttgctgtgtgacctagggaaaattgcttacccactctgggcaagactcttccttctataataacatggaagcaggaagaggataaaggaaataattcatgtagagcatttagcaaagggacccttccccctatatccccccaatgacaaacgccaattcttctctgtcttaagagatgggatcttgctatgttgcccaggcttctctcaaactcctggcctcaaggcatcctcccaactcagcctcctgagtagctgctattataaacgtggccagttctctgctgcacctggccagttctcctcttttacacacacacacacacacacacacacacacacacacacacacatatattctggtcttagtttccccttctggggaaatggggtaatgccttcatggtccccatttcataaactgcctctgaggccatgtgaaataatgtggccattgggaaggaaggcctctaggaagggaagggaccacacaaagtcaccgcaagatgtttcatcattcttggccatcagacacttgatttctggacagtgggacctgtaggattaggcacagcaatttggggcactttttttttctttctctttcttttttcttttcttctatttcttttttaagccatgagccaagttattaatgggcctttggcagagaaaattaatttctttatttcctaattaggaagaagagcagagactgtactagctttggtggcactggttcagcacagagaaccttgggctgacctcggggtgaacaaattcttttttcaacttaaaaaaaaaactctcttatattttagagtattaagtgagctcagaaaataaaagagataaggcaaagaaaggaaacacaaaaaacaaaagtaaactgaaaaatagaagaagacgataaacaagtgaagttttggtcaaggcactgtccttatctttcactaggagtggtggaacatagaggcagtatctggatggagcggttccattgtgatgatttctggtggccaaaacaggcagctagtgcacgaaagccatcttggtaaaaaaaaaaaaaaaaaagatctaccttcatattccaggaggacatacttttttgatacgacaaaccatgtcgtgctgatctaaacatatcagtcatttacactttagtgtgaattacttcaactgggtttattcttagatacttggctgagatcatcagccagcttcctgatacatggggtgggattcctcagaggataaaggggcttgcatctgcccagtgaccaatgggataaccggttttttggtaaatttttctttccataagggagcttcttaaactttaggtcctggtactccagaggcacttacatcctttcttgaaggctgccttgtgcctggtctttccatttctagcaatgctaatgatgtctgcaggcggatcacgaggtcaggagatcgagaccatcctggctaacatggtgaaaccccgtctctactaaaaatacaaaaaattagccgagtgtgctggtgggtgcctgtagtcccagctacttgggaggctgaggcaggagaaccagggaggtggagcttgcagtgagctgaaattgtgccactgtactccagcctggggacagagtgagactccatctcaaaaaaaaaaaaaaaaaaaagtagataattccaaataaacctgtttggacctatgtaagaaaactaaggttttcttgttcactctatttttttagagatgaggtcttgctctgtcacccaggctggagtgcagtggtgtgatcatggctcactgtggcctcaaactcctgggctcaagccatcctcccacctcagcctcctgagtagctgggactacaggcatgcaccaccaagcctggttaatttttcttattttttatagagtcagggttgtgctgtgttgctcaggctggtcttgaactcctggactcgagtgatcctcctgcctcaacttcccaaatagctgggactacaggcatgtgccaccatgcctggctaatttttaaatctttttctagaggcagtgtctctctgtgttgctgagctggtctcacactcctgggctcaaatgatcctcccacctcagcctccccaagtgctgggatcacaggcatgagccaccacatccggcccaccttttcactctttgtatctgaattcttttctatgtcctcttggaaggaatagattgggcattggacctaggctggggacccagttccgctcactaccagagatgtggccttgggcaagttacttcccctctgggagcctctgtttcaccctctgggaaatggtggtgatgatcattattgtcctgcctggctcatggaactgcggaaaggtcaccatggaacgtgtgcatagatgatgttcccgtgtctttcagaggcgagtctggagccgggaaaaccgaaaacaccaagaaggtcattcagtacctggccgtggtggcctcctcccacaagggcaagaaagacacaagtatcacggtgagtggcagttcccaatcagaggccatgatttagccaaccggtctccagcttgcagcccaaccgagatacaaacagaacatcattgcaagaactcaggccccatctgactacccctcccctgaagactcaaagagggaccgtctttttggcgagcaggcctgttgagtgtgggtgatttcttggctcagctagaagcatccctccagaagggggcccgttttgtgaaatgagaataagccctttccttccatagcgagatcttcctccacgtcggggcttctcagtggtggcactgatgtcattttggaccagataactcttccttggaggggcttccctgtggctcgtagaatgtttcacaacatccctggcctcgacccgccagatgccgacagcccccttccctccagttgtgacaaccaaaaatatctctagacattgtcagatgttccctggggtgggacagttgcccttgattgagaagcactcctttcatgaatctctgtaacgtcccaggggttaaggtaccttttgggttcccggattcctccacgtgtccccctgtccctgggatggagatgctggtatcactcggcccgtgggcttcagtgcaatgccattcagtaactgtggattgagcacctactgtatgccaggaaccacttggggtggggacctggggataagtctgagagatgctgttattctcttctctgagcttccagacctgtggaagagcatgtagttgtcaaagaatccctcaaataaacagatgatgacacggtatgactaagagcttgggaggaaaagaagagcaggtttctagagtcatcacctctagggcccatccttctcttcctcctcgtgtgtcagccctgccccatctatcccacaggagggggcacgtggtagggccgctaggactggccggtgcctccgtctgcaggtttgtgggtgggaagatggtaggatggagatctgaccacggcatggggtgtctccagtgttcgccattccagatgtcactttgcgtcctcagaggggactctggggcagccaccatggccggcttgtctggaggcccttggagatctaggatgggcgctggtcgtggctttggagaactttccttctccaaacaaatgcaggaaactcaagattcagcatcctagaattgtctctggcaagttggtttccagccatagtgagtgggaacaatggccccagaggctgtgtggcagtttaaacacagtttccactgccttccctttccctaaagagtaaacacaggagataatactttctaacaactcatcgttatcaagggcctactatgtgctgcttgttttggctgcatgcgtaaacacatctcagacattgtctcactggatactgttttaaggagcctaatgtggccccagtaattatgaaaacctttgaaatgtctggatctctaagaaattagaaaaaggagggaatggctgagcatgggggctcatgcctgtaatctgtgttttgggaggccaaggtgggaggatggtctgagcccaggagttcaggaccagcctgggtgacatagtgagaccctgtctgtaccaaaaaaaaaaaaaaaaaaaaatcaagagaattagctgggcctggtgtgcatgcctgtagtcttagctacttgggaggctgaggcaggaggattgcctgagcccagtaggttgagactgcagtgagctgtgatcgtattcctgcagctaaacagagagaaaagaaacagtatcaaggaaaaggagctgaccagtctgtctgggagactccaggctgtttggggggatcaaagtcatatattctccagcccctgatgtccatgtgatggaaataacgctgacatttgttttatactgtgttgttcaaccacagcaaggcccatcttttgcctacgtgagtaactgagagtgttttcctggtgtgtaggggaggcacggagtgaacttagatctgcatgatcctcttgcacccaccgagtcccgtagctggtggtagaaatggggtaggccctagagtttcacaacttaaatcagtaaatgcaccaaaataccatcctgtgggtgtctgatgccagggaagggtgtgggggtgcatttaccacccacgggacgcctattggagtccccagggttgcgctccagcctgaaatggatttctccggttcagaatgaacccctgcacccttcaaagcatccgctcctggtacccttgactggaacaacctagacagagatgtctgtcccatctggctgagtgttttaggactgtcaggccccaaagcttccctggctcgatggacagtcgatggcacagctgtggcatgcctccctcttctctccctgccatcatccctaagtgtcttccctcagccctgtccctggtgcaccagtgtgtccctgtgcatgcgtgtgcagtgcgtgtctgtctcttgcatgctggttgcttgactcaagcctccagaaacagtcttggaggtcgcgatgcactagctttggtggcgcggtaaggccccagctacgcaacgcataacctggtcctgcttggacctgtgcatatgtaaactcatctctaacacagagcttggggggctgatgtgtgggtcccagcctagaagaaacccacaggtgtcttccttggctcccgaaaagatcattcaatccatcttagttagaccctgggtgactgtgttgcagatcagaaggagaattacagttcttatttgggatctgcttttgtgtgaccttggccgagtcagttaactcctcggggctatggtttcatcatctataaaattgagggtttgaaccaggtcccccgatttaaagctctcttgccaagacttttcaaccttacctgccagaatccccattctagaaagggagcctttttcagagagcatggagaccccaagtttatgtgaacaaaagtgattcctttagtcgtcttcccaccaacaaagaaatgcccgtggtgctccttgtaaatttccaccagtctcagctgtggtgattccacttgtagctgagatttgtatgcggatgaggcttttgcttcatctttctctgggagctacaaaaaggaggatgtgtggacaaatcaaaacagaaacaaatagcagcttcctgctttgtcctgtagaccaggtaccctgatgccttcctagcatgcggaggaatgaggaggaagccatgcccatccttgtcccctctagacactttcccggctcctgtccagcccagccctgatgcctggaaaaataaggaagggaaagcaggaggggaggacaaggagaaaaactcccagaatccagggcctggaggcctcggggcccaactgcagccgccatgttttagggctaggccaagagcagctcgtttgctttcccagcttaacttaccacattggccctttcctgccatgattaatcacgtgaccgcgtttgtgcaaaggcatcccggcagagggggccggtgggctgtgtacagtctcagcttcctttaacccaatgaatggagctcaggcaacctgctttgaagctttattccgcagtccgctaagaggattcctggtgggttttgtgcattccttacttgtctgctgtagaagacttcagaaaaccagtcctgagaaagaaaaaattgcaacttaaaaaaaattgcactaaaataattagaaggaggcttgtagtggtttaacttgaagaaggctgcttgttaaacatgaacagcagcacgactgccatgtacagtgggacaggtggtgcactgcacaactccggggggcaccattcatcatgatgtaaatgacatcaccgacattgtgcaaggcagtggctttgagtggcagtgatgttgcacagatgagcaggccctggtcttgaaaaaagtgaccttcctagggagcagatgtcctagctattagagagctcagacagttgcttctcttctgaaatcctcctgtaaatctgaacattagcatcagggtctaagaggaggtaggagataggagagaacctgtgggttaagggcagagttttgtgacaacatccatccaaggtagaactgtcaggacctaggttgctttctccaataactagatgtgaatgaattttagggagagctggaaaagcagcttctacaagcaaacccgattctggaggctttcggcaacgccaaaacagtgaagaacgacaactcctcacgattcgtaagtagcaaagccacatggattttccagaaaagctttggtgtcatctcctgcctggggctgcagagtgtttgcgtgcagaggtgggaggggcatctgaccctggagagatgggctgtatctcacaatcttgcaagggctcctgcctctcactctctcattcattcattaatttattcactattcactcaacaaatattgattggcctggtgcggtggctcacacctgtaatcccagcactttgggaggctgaggtgggaggatcacttgagcccaggggttctagaccagcctgggcaacaaagcgagatcccatctctattattaaaataaaatttaaaaaattaggtattgagcacctggtatgggctagacccttatatccgataccattttatgtaacaaaacatgaattgagtgccaactgtgtaccaggcacacacctcctccaagaaatacttagtaagtacctactgtgtacaattactctggtaggcacttttacatgtaccaccattctctttgtttttttctcatttgctgtttttattaagtgcctactgtataccaggcactcagcgagtctcacaggattgcgatgaatagttcagatatggttccagccttcatgaagctggttcttccaactgaataacagagagtaagtgaggcagggggtactaccttcccatgcacactcccccaggctccaaagcaaaaagtttttgcctgagcccaacagggcaggggaactctgaaagtggatggttgatgataggtagacaacaatggttttattgtgcaaaagaagcggttgtctccgtaggagggtcagaaagatattttagtgagaaaagatgaaggaaaaattgcctctgcattccaggagaagggggtctctgaactgttgctcgctgagatggggccctgtgaaagactctttgcagaaagctctgctctgctgagcaaatgcacatggtggtccctgaccctgtgatccccaaggcccattttagtaacaaacaattacataatgtctcctttcctcgcccgaaattagaatcatagatagtatcacctcctacacgtattagatgaatacacatcagcataatgccctaactggaatatgaagaagaaataacataagacaattcataatgaaagtgtgcatttcaggccaggcgaggtggctcatgcccgtagtcccagtactttgggagactgaggcgggcagatcacttgagctcaagagtttgagaccagcctgggcaacatggggaaaccccatctctacaaaaataaataaataaagtgcatttcagcatatcaatgctcgggccaggccacaccaacagaagacacagtaagagacagacacttaggtctatccacggcgacagctacaaatacaaggaaaagggtcaagttcaggcactgatgatgttggcatgggattttccagaatggcaactgactctcagtgaagcgctgaaccaaagaacaatcttctctagagtcacacagatgggatattcttgtattagaacaacattttaaacacttgttaatgctttcatttaaaagcataaaaatctagaccaggcacagagtggctcacacctgtaaacccagcaccttgggaggctgagttgggaagatcacctgaggtcaggagtttgagaccagcctggctaacatggtgaaaccctgtctctactaaaaatacaaaaattagctgggcgcagtgacacatgcctgtattcccagctactcgggaggctgaggtgggagaattccttgaacccggggagatggaggttgcagtgagccaaagtcacaccactgcactccaacctgggcgacagagtgaggctcttgtctcaaaaaaaaaaaaaaaaaaaaaaaagcgtaaaaatctaaagtcataaaggttaggttctaagcctggctaattacaaacagatttttacctccatgagtggcaggtgagacattggaagagtcataagggatatagacaaggattggcatcagagactctccaggtcattgcaggactcccaaaatatccttggccccactgttcactaacaacagcggcccccccccaacatgtgacaagccaaataatggcttccaccgatttccaaaatctccatagcagatgtgccgcctccactgagaagcactgcgtttgcatgttccaattctgtgcaatgtttctagcctgtcataaatggaagcacgtgcaagacaaatccctaaaaacatcctccactcactggcgtccctgccatcttgggaaggagagtgaagaaggtgcctgggccttgcctgtgaccagccggctctccctggctccatctgggatatggtcatcccaaatcactctactgcatgtttcccaatggggaaagtttgaaggttttgtcaaggactgagcaagcctaggggattgtgtccacacacgccaacacttcccaccatgttatgtcatgatgggggaaaaggatgaaatcctgtctcacctgttgaggaaacaggaaaagggttcatgccaacagatggaggattgggttccatccttggtttcatggcttagctgaggcaggtagatagggccatctttggagatacttgttgagcctctagggccaggaacatgagccattcctgcctaaaggacatcctacacagggcctgcttgggcagtgtggccaatgcatactcacctgtcccacagaaaaggtttaatccatagttggatgatgtggatgttttggagcagggtggggtctggggagggagccctctagcccctgaatatggaaaaaccttctttctgcttagggccctacctctcaggagcaacgtcacgttggacaagtcacttgatctcttttagccttagttttcccagctttaaaatggggatagtgggctgggtgtggtagtttactcctgtaatcccagcactttgggaggctgaggtgggaggattgcttgagtgcagcagtctgaggccaacctggacaacacagtgagatcctatctctacaaaaaaaaatttaaaaattagccagatatggtggtgcatgcctgtagtcctagctgcttgggagggtgaggtcatggggaaaaggggattgcttgagcccaggagttcaaggttacagtgagctgtgattgcaccactgcactccagccctcgctgacagagcaaaaccttgtctctaataaataaataagtttttttaaatagggatagccatgatggactacggtcattgcaaaagccgaatgaaattgatctgtgaacatgttttacacgttctgttgctgtcaggcctggggtggtttcagctcagcagatgttggttccgcctgacaacttgacctgtggggttctgagtgttcgcaagaatctccccgccccacctcccatcctctgtaccatctgcctcctgcttgcccacagcatggggttaacggctgaagttgggcagcaaagcctgaactgtgttttcctgttggcagggcaaattcatccgcatcaacttcgacgtcacgggttacatcgtgggagccaacattgagacctgtatcctttccctgagcctgggccaaatgggtacccctgccccctaccaatctcctgcccagaggctgggagagtccaagagccacctctatctttccagcctcttaggtttcttccagaacaaatctccccttaacagcaggcattgtggtgcagtggttatacatgtgtggaccggacccctggtttgaaccctaaacaagcagcctaggctgcatgtgatgctcaaatgatctgtcccttagctgagtgaccttgggctggttactccacctctctgtgcctcatcagcaaaatggggatgataatgaatggtacctgcctcatagaaatgtgagaatagagtgaatgaactcatataaagctctaggcaccatgcgaggtgcagagtaagggctggctacgtagtgtctatcgtatgatcttcacttcatccttattcagccattgtccgaggccaaattctggacctgtcgtcctcttagagagttggtctgtgatcggctccacttcttaggtaggaaattgatgaaaacagagtttacccagaagaatgctggtatcgcaaggaacaagtagagcatctctttcatgaacctgagcggtgaagtggagccaagttagaaatttctggacgtgggggaacaaccaggtctagagttcagtgactgatcagcctcaggagctttgcaggcggccctagggctcaggcttcctgtggaacacgtgcttggcaatgtataggacctgggggcctgacttagcttctttctgcacctgaggtcctctagcagcacctagtggtcccatttttccacgttatgtgccctggataagagggtgggttgtggagtagcttcctctccactgtacttgtctaagctgtggggatttgggaaaatcactgaagctctctgggcctcagttttgcctcggtaaaatgggggtgattgcacctagtttctggagctggtgcaggggttaaatgaaataatatgcataataatatgcacagcccttggtacggtactgggcccaaagtgagcatctcataggtggtggctattgcgttaactcaatgttttctacgtttctactttaatctgcccaaaccagccaggattcccatcctgcagctaggagggctgtcaggcttcggtcaagtccagagccagggccctcttgtcctgcagccctgcacacacctctcagcaattcatttcctgtgtttagagcgagccccaggcatagccccgtccttctggcctcagccttccttttagatcagtggttctcaaagtatgtttccaaaccagcagcatcagcatcacttgggagctctttagaaacacacatctcagccaggcacggtggttcacgcctgtaattccagcactttgggaggccgaggcgggcagaccacttgaggtcaggagttcgagaccacctggccaatatggtgaaaccctgtctctactaaaaatacaaaaattatccaggcgtggtggcatgcacctgtagtcccagctactcaggaggctgaggcaggagaattgcttggatccgggaggcagaggttgcagtgagccaagatcacacactgccctccagcctgggtgacagagcgagactctggctcaaacatacgtgcgtgtgtgtgtgtgtgtgtgtgtgtatgtgtgcgtgtgtatacccatgtacaccatgagaaagtctgagaatcactgctttccagattggacatgggctgtggtagcccgggcactgctagctggctttaggacttgaagaagacaaggtctgctgatctagccccatcatcccgcaccatcatgcttagtgctgtggaaatccacccagtacagtagcccagcctcccagctgccctctcccatcaccccggaccctgtgatctccatgccaccctcacctgccctcccctctgctctccctcctgccaccccgcatcgcggagaagctctcctgaaattaattagtgtggcgtgtttacggtctctctcgcctccatcccgtcagaccccactcttggaacagagggcatggaagacagctttgccacttgttagctgtatcatcttgagaaaggacttctcttctctgagcctcagtttccccttattgaaaacaccgataatagttgcacttatttcctagcatactttgtgaggcttcagtgagacaatttatatcaatcatttcacacaggaatgaatcataaatcataggatcatagatggtgtcattatttgtattctgtcatgtctgaagacagctcattttaaagaagatttgctggtgatggctgttaggggaacatctcgttaccattaccttcttcctggagcctttttatgctttttcttttcactctattcccctcccttttttttgcatctgaagtctgctggcagcacccagcggttccatttgtccataggggcaatggtcaaagttagacattaccgatcccaggggtagaactggaaagtcatcccatgtgaattgggtgtgacagggatggaggtggaagaccagaggaacacccgcagtatccccagaatccctaactccctccaaaccagatctgctagaaaaatcacgggcaattcgccaagccagagacgagaggacattccacatcttttactacatgattgctggagccaaggagaagatgagaagtaagtgactagcaatgacatgtgattggatggcttgagccttccctttcatcagaatccggggttaagggattggctattaaaacagtctcagatcctgccagaaaggaccatgtctgtgagtgacatatgaacagttcttcatctcctcccaatgagtgagtgtggcttgtgttcagtcattctcatttactgagcacctactatgtgacatagtagccatcaactccaattagacattagatcattaatgattcatgtctcattagaccagagagcatcaagtccaactagacacaatctacgccttcaaggaaagggagaaagacatttgccttacttgccaatttataaaacttgcaaatataaaagatgcattctggttttataaggaatttgcaggggcagcaggactaagcatttttcattatacatgttttgccagtgactttgtagaacaggggtcaagactttttctgtaaaaggccagatagtaaatcttcaggctttgcaggccaggtggcttctggcacagctattcaactctgccattgtaatacaagagcagccacaggcaatatataaaccaatgagtgcaggcaacacataaaccagtgagctcaggcaacacataaaccagtgagctcaggcaacacataaaccaatgagcacaggcagtacataaaccaatgagcacaggcagcacataaaccaatgaacataggcaacacataaatcagtgagtgcagatgcatcactgtgttacaataaaactttatttacaaaaacaggcagtgtgcagaagtttgctgacctctgttgtagggaaaagtttttttatgtaaatataatacactgtataccaaactccagtaggaagttatgagttctggacctgcagctgtttactaactcttaaaaatatatacaaatcgcatagcttaaaaaaggaatggatcagtgactatctgtacatagtagagtctacatgttagtaataagttttgagtctgaaattctatgggaacaatacagactttgcttcccatctcttttgtggcccaaggttagttattttggttaagacagttaccaaaaggatctgtgtgagctcagaacttcgctgtgtcggagtgtattgtagacctcagctactagggggtggcattatccattatttaaatttccagggtggggcaaagtggctcatgcctgtaatcccacactttcggaggcagaggcgggcggattacctgaggtcaggagtttgagaccagctcggccaagatagtgaaaccctgtctccccaaaaatacaaaaattagccaggtgtggtggctggcgcctgtcatcccagctacttgggaggctgaggcaggagaatcacttgaacctagaaggtggagtttgcagtgagctaagattgcaccactgcactccagcctaggcgatagagtgagactctgtctcaaacaataaaaataagtttccttaatggctggctttcaggaacataggctatgaggtggagcaatttttggtaaagggggaatgctgaatggattttttatgtaccagcaaacatggtatattagcagttacagtgcaggaccctgtggaatgggccagggaaaaatgttgacattccttttccttttatttggcacccaagaaaacagtttggttgtttggtaccttgggttccagttttgtgctttgcctctggtcttccagaaatgggcaagtatagggctcagaactaaattcccaggggccgtttgtattctagatgatagaactggaaagatgttaggcttttagaaagaaccaaatattgctaaatgcatccaaactcgggataatgaagtcttggcaaagacctcaatcctcgtgacttgaatcaggcatttcaagttaatccaaaagtttgagttaactggtgccttcagtcaatttaacctcgagtttatcaagcagcttccaagtgacttgacccataaaagaccttgattttgaaagaaaaatatcttgctgacgtctctccaaaagtataaccgaatccatcctaattaaagattgatctggaagaggatccttgatgtattggagggtataataaaagcaaatggtgcaggagaaagaaaggcaattataaagttgggggtgggggagaagctgaacaacaacaaaggaaatgtaatcataggatacagtttgacacagaatatctaattaatgtcataaaaagggagttggcaaactgtttttgctaaagggtcagtagtaaacgttttagactttaaggaccagatggcctctgttgcaactactcaactctgttgcctagtgagaaagcagccatgagaaataaacaaggacatcagagcagctgtgtttcaataaaactttatttacaaaaacaacaggggaccagatttgccaacctgtgatataagccttatatattgattcaactaaaaatagctgggggtggctgggcacggtggctcacacctgtaatcccagcactttgggaggctgaggcgggtggatcacctgatgtcaggggttcaagactagactagccaacatgatgaaaccccgtctctactaaaaatacaacaaattacctgggcatggtggtgggtgcctgtaatcccagctactcgagaggcaggagaattgcttgaatccgggaggcagaggttgcagtgagcagccaatatcgcaccactgcactccaacctggacaaaggtgaaactccctctcaaaaaaaaaaaaaaaaatagctggaggaaaggaaaggtagtataagaaagctgcatttttgcctaccatagcaggaagtcactagatactatctaaacttgacatatccagaaatcgcctattacagcgattgtgctttgcctctggtcttccaataggccaaaagcacctgttacttttggcactgaggactggtttcctggaagaaaagttttccacagactgggcgggcagggttggggggatggtgtggggatgattcacgtgtattacatttactgtgcactttattattacattgtaatatacaatgaaataattatactagtcaccataatgtagaatcattgggagcttgttttcctgcagtcccatcggggggtgatgggggacagtgacagattatcaggcattagagtgttataaggagggcacatgtgcagctcacgatagggtttgcgctcctatgagaatctaatgctgctgctgatcttatgggaagcggagctcagacagtgatgcaagcgatgggcagcagctgcaaatagcggataaagcttcacttgctcacctgctgctcacctcctgctgtgtggcccagttcctaacatggaccggtactggtctatggcctatgggttggggaacccttggcctatgatatgtaatacataatggtatatacattataataggctagtatatatagcaagcctattgtacagagagatagtggtaactgccagataaaaagcagctaaaagagataaaagcaggtattatggagtaaggtagagttggagaagggatgtgacaggagaatgctatttttcattataaacctttggtagtaattgatttttaaaactcatgtgcctgtttgaatttgataaaaattttataaatacatgaataaggccaggtgcggtggctcacgtctgtaatcccagaactttgagaggccaaggtgggtggatcacctgaggtcaggagttcaagtctagtgtggtcaacatggtgaaaccccatctctactaaaaatacaaaatttagccgggcgtggtggcgggcgcctgtaatcccagctactcaggaggttgaggcaggagaatcgcttgaacctgggaggcggaggttgcagtgagccgagatcgcgccactgcactcctgcctggacgacagagtgagactccgtctcaaaaaaaaaaaaaaaaaaaaaagagtaaaggttgatctaactcttctgacagctttgtctctgaaggctgaaggcagggtgcctctagacaattgaggtaaaggcatcccttcctccaggtaaatgtaacttcgtgccagggattgtggcttagcaagcagaaccaaggctggatatcagctgcagtcactggagcagtgcacaacctgcaccgctgtgtaaggctggcagtggttggtgaggctgtctacgtgacgatgcgtgagggctttaaacggttcaagccttgataaagggaaaggaattatgatggcccagacccttgaccagatctcggtctcatgttgaaattagaagtatgtcttattgaccctgacctgtcttcctctccttctaggtgacttgcttttggagggcttcaacaactacaccttcctctccaatggctttgtgcccatcccagcagcccaggatgatgagatgttccaggaaaccgtggaggccatggcaatcatgggtttcagcgaggaggagcagctatgtaagcctcacaccttgagtctggagggtagcttgcctggataccagtggaacctgttaagaactcttctctggtcaggacagatttctgctctctgaattccccaccttccattaaaaaaaaaaaaaaaaaaggaggaaaatgaattttattctaggtggtttgtttgtgttgtagaaaagtggctgtataactagggttgcaagtaacccgagctggcttaaaccaaagggaaagtgactaactcagaatgttgagaagttcagggaggttaggcacagtggttcaggtctgtaatctcagcgctttgcggggccaaggtgggcggatcactttaggtcaggagttcgagaccaacctggtcaatttggtgaaaccctgtctctactaaaaatacaaaaaaaaaattagccagggctggtggtgcacacttgtagtcctagctactcaggaggctgaggtgggaggattgcttgaacccggaaggcagaggttgcagtgagccaagattacaccactccactccagcttgggagatggagctagactccatctcaaaaaaaaaaaaagttcaggaattcaagcttcaggtacagtgagatctaggtgttcaaaagatttttctagaacctaatttcttgtcttctatctctctcgactacattgtttctctataggatgcagtttgttgacagcaacatagctgggttccagcccttatattctttgggtttatgtccaaagaacagagtagattcccggcttaagttcctgaatggagtgtcattgactctgattggttggcttaggttgatatgcacattcctgagctatgcagcataggcagggttgtggaaagcgcagggtggtttcattatggtccctaagaatggattcttggagctgaaggtagagatgttggcctcatcaggaacatgtgggcagggtttaggggagggggagtgatcgaggcagtggatttactcaggcttttcctggaggggttgctctggtgatcaattgatattgatcaaaatcatccaaccaatggccaagaaacacactgggtcttgagaacaggacagctcagaaagaaattcttggtcgggacactgtgtttccagaaacgattttccttctgcgttagatgtgcctcagtgttgaaggttaatctctttcaggaacaccaggacagaactgtggaaagtttcccttccttcccacgcctacgcccgtttggagccccagaatagcactgaggttgctgaaatgctgcataaggggaggggcagctcctccgaagataacttggggtctggaaaattaggctgtatgggtcagttgacaaatggatggtgtatgtgggtcttggccagggtcccacatcagaatctagtgctgatagcctccttgtctgaatgacataggccctccaagaatgattcatttcatttgggacaggggtcagttttgcttctaatcttgcttttaaataacaatgaacaatggttaagtatttgctgtgtgccaggaatttaccaaatccttttttcttgatgtactacactgttcagtatagttttatttaaataataaaaaactggaacaggctgggcacagtggctcatgcctgtaatcccagcatttggagacactgaggcaagaggattgcttgagcccaggagttcgagaccagcctggataacacagtgagactctgtctctacaaaaaaaataaatagaaaaaaactggaacaaactaaaataggttgattaatagagggtttattaaatcattgtctgtccttgtgaaagaaaacaatgagaccatttaaattgttttgctgggcatggtggctcacgcctgtaattccagcactttgagaagccaaggcaggcagatcacttgagcttgagtttgagactaacctgggcaacatggcaagatcccttctctacaaataatacaaaaaattaactgggtgtggtggtgcacactgtagtcccagctacttgggagactgaggcaggaagattgcttgagcccaggaggtcgaagctgcagtgagccgagatcacaccactctgtcacctaggctggagtacggtggcgcagtctcagctcactgcaatctctgccttgcaggctcaagcagtcctcccagctcagcctctcaagtcgttgagactacagacatgtgctaccacgcctggctaatttttgattttagggtttttgttttgttttgtttgagatggaggcttgctattgtcacccaggctggagtgcagtggcacgacctcggctcactgcaacctctgcctcctgggttcaagcaattctcttggctgagcctcctgggtagctgggattataggcgcccaccaccatgccccactaattttttttgtatttttagtagatactgggtctcgccatgttggccaggctggtcttaaactcctgacctcagatgatccacccatcttggcctcccaaagtgctgggattgcaggcatgagccaccgtgcctggcctggggttttttgttttgttttggtttgatttttggaggggtgggtagagacaaggcttcaccatgttatccagtattctctggtcttgaactcctgggctcaaacaatcagcccaccttggcctcccaaagtgctgggattacaggcatgagccaccatgcccagtccccagtgttctcaatgtactttggcacttgtttcccctttaaccacagagaccagactccaggcccagcaccttcggcagccccaagcatctagctagaatttggtaatactgttttccttgtatttatatttataattgccatctatttatggcaagtgaagatgatttgtcactgaagatagagaaagttttctattaaaacaaatgtaaggaaagagaaggaagtaaatttaaagaaaatgattaagcaaataatggagcagatggtacacagagcaagcattcagacgatggcgtgcaaatgacgaactctcataggaaccaacttagtcctaaatgtacaccaaccccatttataaaccaagagctacttccaaaccctccatcaaggggcctatggagaagggggtgggtcaggcttcaggctggagcttcatgaggctccaagtgaccaggggacaccaggattttccccaccacattgggttctgcagccttgaactcctggcctcaagatatcctcatgcgccaccatgcctggcctggttatactgcttctaatgtattttgaagataaaaaataaaatcacctaaattgtccatcctgtgtatccctggtggtacacatgtctgatgttggaaagtcctgtttcttattcctcagcaagaagagaggtgtaaggccactgtaaaaaattagcacaaacttgatgccttaaaacaacaggaatttattctctcccagttctggaggccagggttctgaaatcagggtgtcggcaggagccgggcataatggctcatgcctgtaatcccagcactttgggaggccaaggcaagaggatcgtttgaggccaggagttcaagaccagcctgagcaacatagcaagaccccttctctactaaaaatttaaaaaaaaaaaatttttttttttttaaaagacaagatgttggcaggggttgttcctcctggaggcactgagggagatctgttccttgcctctgtcctggcttctggtggctctggctgttcctggcttttccttggcttgtctcactccagtctctgcctcatccttcatgtggcattctactctgtgggtcttctcttctgtccatcataaagacacttgacattaaatgtagggcccaccaggttaatccaagatgatctcatcttgagatcttgtacttgattccatctgcgaagaccgattttttccaaaataggccacgttcaggctgggcgcggtggttcacgcctgtagtcccagctctcagggaggcagaggcgggaggatagcttgagcccaggagttcgagacctgcctgggcaatatagtgagaccccggtatccacaaaaaggaaaaaaaaataaatgtaaccccccaaattaggccacattcacaggttccaggtggacatattttagaaagaccaacattcaacctaatataggtggcttccactctttatcacctactaggccaggcccttgctcagcatcttacaagacctaaacttcacgaagcaggtactactgttaccatctccgttttgcagatagggaaactgaggctcatgggacttattgagactcatgtagagtctctatcctctattcatccatgattcatccatcaatccatcctctatcatccatctatcctctactcatccttccatcacccatccatccatcacccatccgtccatccatctacccacccatccatccatgaacccatcctctatacatttatacattcatccatccattcaccctccatctgccatccatccatctccctccctccccatgtgtatctggacccggaactaggatttggaaattcagagataatgagatttataagaagcaaagctgggatttgaactcaggactctctaactgcagagcgcgtgctttgcaccagcacaccaggatgctgccagccgtcaccacccttgctgtgttgtgtctcctcactggtttacttctttgctgtctgctaattctgccccaaggttcatctcttatggcctgggagtggtggcattcttttgtcatttctggaattacatttaactataccagaaagtgcaaaccaatggttcctgagcccacaggagagatcggccactacaaccttcaaaatttttagaaattggttcctaaagtttaaatatgggtaggccgggcactgtggcctataatcccaaccctatgggaggccaaggcacatggatcacttgaagtcaggagtttgagaccagcctggccaacatggtgaaactccgtctctactaaaaatagaaaaattagccgggtgtggtggcacacgcctgtaatcccagctactctggaggctgaggcaggagaattcccctgaacctgggaagcgcagaggttgcagtgagccgagattgcaccaatgcactccaacctgggtgacagcaagactcagtctcacacacacacacacacacacacacacacacacacacacacacaccaaaaaacatgggtacacttcacataaaaactctgggtttccattatctagaaaaatcagaagttccagcaacacttggcttatatcccctgtggcaatgacggagtagctgctggccccttcagatgggtttgtggcctccttgggtccccacagtcctcattagttggctttgttcatttagaccagtggttctctgccagaggtgagtttgcctcccaggggacattgagtagtatctggtgacatttgtggttgtcacaactctgtcagggtaaccaccactgacatctagtggttagaggccagggatgctactaaacttcccatgatacccaggacagctccccacaatagagaattatctggcccccaatttctgcagtgacaagattgagaaaccctgagttggccggctcgcctgggctgtgcaggcatttcaggaatctttagtttaaattgacacttttaaaactgtgagtgcaactcttcatagtttacaaagactctttcatagatgttatggttaaaaggaagtgtgtttccaagccctgtcaacagcagcttcattcattttggggagaaggctttctaccatagtaagtgggagcaaatggatgggtggtcagcagctgggtccttttgctgagctgggccagggaccccatggcgtgagaatagctgttgtgaagggccttgtaatgtctggtttggcctgaggaaccagagaagtctgggatctctaggctttgttcctggaacatagtgactgatttgaagccagaactctgggtgatttgtacctgagttaagctaagccaagaatttgcattaatcatcatccatccattcatccatctaccatccatccatcatctgtccatccatccattcatccatccatcatccatccatcaatgctgtatccattcctccatcaattctccatccatctatccatcgtctatccatcaatcctctgtccattccatctatccatctatcctctatccatccatccatcatccgtctatcctctatccatgaattattcatccatcaatccatcctctattcatccatctatcctctactcatccgtccatcattcacccattcatctacccacccatccatccatccgtccattcatccatgaacccatcctctatccatttattcattcatccatccatccaccttccacctaccatccatccatctctctccctccctcccatgtgtatcaggaccttggaataggctttggaaattcaaagatgattagggcaggccctccactctccagaaactcatggtcttatggggatttcagacatagaaactattttaacagtaacatggcctgagtatggagtcagaaaggttccaagtattctgggaacacagcgtttttgtttggagacacctggacaacaagtggaaacaaatgtatatcttcttcatcccaacatgggcatctgttacacccagaagagtatgtaagaagcacagggtttttatttcaaaaatccttttattgacatatgatttacatggagaaaattgtgtatgccatagcgtgcagtgcaaagaattattataaactgaacacgtctgtgtaactagaatccattttaaataagacaatgccaccagccccatggaagctcccacatgcaccttctaagaacttccctcaattaaggataatcattatcctgacttctaacagcatcgattagttttgcctcttcttgaatggacggtctatatatggacttagacagtatgttcttgtttccatctgtcctcttttgttcggtatttgtgtctggaagatatgtcagggttttttttttgttttagagacaggatctccctacattgcccaggctgtatcaagctcctggcttcaagcagttctcccacctcagcctcccaaagtgctggggtcgcaggcatgagtcactatgctggccccaatacatcagttttgatttgtggtagttgtagctcattcattctcactgttctgtggcaggggttgctaacacatttttctgtaaagggtcagatagtaaattctttagcctttgtaggccagacgatctttgttgcaactcattaactctgccagtgtagcatgcaaatagttacagacaatatgtaaatgaatgagtatagctgttttccactaaaactttatgtataatagcaagcagtgggccagatttggtccatgggctgtaatttgccagtccctgctgcgtggcattccattgtaatgcaaggttttaagcaaccatatgaaaatattgagctcagaatctagtttcttcagaggaaagatgtaagctggctctgggtccccagtggctttaggctccaaaactccagggtaccttggcattgacctttgtgtctgctctgcccttctctccccacctcagccatattgaaggtggtatcatcggtcctgcagcttggaaatatcgtcttcaagaaggaaagaaacacagaccaggcgtccatgccagataacacaggtacttgccactttttcctgatgaccaatgactttggggttgggggggtgggggaggtgacatttaaccactggttatttttcaaggtgaaggtatctgggattttaacaacagttggactaggttcttatcactcactttttcaaacttttcagtgctcaagaccctatgtggaaagttattgaatcagagcgcagggattaaaaaaaaacaaacctaatagttttatttatttgttcttttttttaaatacaaaattttacaagttttaatagagacgaggtctcgctgtgttgcccaagctgatcttgaactcctgagctcaagtgatcctcccaccttggcctcccaaaatgctgggattacaggcaagagtcatcacgtcctacccctaatagtgaccagacaagatcccgagggaccatctcttctaaaataccccacttaattgttttgttaaagaaatatttctcaagcccctgcaatatgccactgggatacagcaggaaatgacacaagaatagctcttcttacggtatctgtggtcgtcttggggagacagacctcaattgccctgagaattaggggtgccagataaaatacaggatgtccagataaatttcaattttaggtaaacaacaaacctttttttaaattttaattatgtcccttgtaacatttggaccgtgattataccaaaagagtattcttgtttatctgaaattcaggtttaactgagcatcctgtaattttccccctaaatctgataaacctacccacaaataaacagtattttgtgttttgagaagctggcctggctaccactatgcttgttggtggctgagctgagagcaaaacttaggtttcttatttcccagcccaggctgtatattgtgttgctttttcccgctccctagagcccaccttgatcaaacctgttgcaaccgcttactgggtttaccttgcccacagcctagacagagccaattaatcaagacaggggaattgcgatagagtaagagtaactcacgcagagccggctgcatgggagaacagagttttattattactcaaatcaatctccttgagcattcgtggatcagagtttttaagcataatgtggttagggggaggccagtgagttgggggtgctgattggttgggtcagagatgaaattacagggagtcgaagctgtcctcttgccctgagtcagttcctggacagaggccataagatcagatgagccagtttctcgatctgggtggtgtcagctgatccacctggtgccagggtccgcaaaaatatctcaagtactggtcttaggttttacaatagtgatgttatccccaggagcaatttagggagggtcagactcttgtagcctccagttacaggactcctaaaccataatttcaaacctttgggctaatttgttattcctacaaaggcagtctagtctccaggcaagaagggggtttgttttgggaaagggttcttgtgttttaaactataaactaagaggctaggcgtggtggctcatgcctgtaatcctaggattttgggaggcccaggcaggtggatcacttgaagtcaggagttcaagaccagcctcgccaacatggtgaaaccccatctctactaaaaatacaaaaattagccaggcgtagtggcaggcgcctgtaatcccagctactcaggaggctgaggcaggagaactgcttgaacgcaggaggcggagattgcagtgcgccgagattgtgccactgcactccagcctgggtaacagagtgagactctgtgtccaaaacataaaaaataaactataaactaagttcctgccaagttaattcggcttacacccacaaatggttcagtggagcttggaggttagaagcaaggtggagtccgttaggtcagatcttgttcagtgtctcagttataattttgcagtggcagtttcattctcaggtgtttgttatgtattagagtccctaaatctggcaaattaatggaatccggatgccaaggaaagacctcagggaaagagaaatgaaaaagtgctcttgccaagagatggggaaaaaaaaatcctaaaatcactctatttactctgccttgcacatgcaaagcagcatgtaatgctattttcatgttaagggaccagctcgtggtcacaccactgcacttcagcccgggcgacaggaagactgcatctcaaaataaaagaagagcatttaggttgactctagcattttgctattgcaaacaatgctgcaacacatatcctagaagggtgaaagaaatatttattgaacagtaactgttcaataaatgttactattaataactatttaatacttactaagtaactgttaaataaatctcaagggccagtggctcacgcctgtaatcccagcacttagggaggccgaggtgggcggattgcctgagttcaggacttcgagaccagcctgggcaacacggtgtaactccatctcaactaaaatacaaaagaaattagctgggtgtggtggcaggcacctataatgccagctactcgggaggctgaggcaggagaattgcttgaacccggaaggcggaggttgcagtgagctgagatcgcgccactgcactccagcctgggcgacagagcgagactctgtctccaaaaataaataaataaataaacaaataaataaataaataaatctatctatctcagggactttacatactttaccttatttagtcctgggtaccaacaaggtaccgaagagctgaccctttttaaagctgagaaaagcaagatgctgggagggtaaagagcttttccaaagtcacatgacttggaagtgtgaagggacagggacttgaaactagaactacctgaccctaaacccccaactggggcctgcttcagcccaccccaatcattgcctctcagcaaaatactggggagtgtgaccactaatgacagcagcctttaggacacttcaagctatattcatggtcagcgggtcccatttccccaagagaacccgctgtattcacagatcacaaatatcccatgcgatgtgtcttcttgccaagctatttcttttgtgatgcactcacgatgtttcttttctccatccagctgctcagaaagtttgccacctcatgggaattaatgtgacagatttcaccagatccatcctcactcctcgtatcaaggttgggcgagatgtggtacagaaagctcagacaaaagaacaggtaatgatgtacttatcacttatccatccatgcacccacccatccatccattcatccatctatccacctgttcactcattcatgtattcattaatccattcacccatggtctgcctctgcatctgtccatccatccatctttctacccactcattcatctgtctgttcatccatccatccatccatccattcatctgcccatctatctgctcacccatcatctctccatccctcactcatccatctgtccatccatccatgacccagccatctgtccatctgtccgtccatccatcacccatccagctgtcattccattcattcattcattcattcatctgtccatgcatccacccatccatctctttatccctcatttattcaatactagaatattcacagtcccatgtcaggttttgtttgtttgtttgttttttgtttttgagccagagccttgctctgttgcccaggggggggtgcagtggtgccatcgcagctcactgtagcctctgcctcccagattcaaacgattctcctgcctcagtcccccaagcagctgggactacaggcatgcaccacaacgcctggctaatttttgtatttttagtagagaagggtttttgccttgttggtcaggctggtcttgaactcccgacctcaagtgacccacctgcctcggcctcccaaagtgctgggattacagtgtgagtcactgcacccggccaagaataaaaatcttcaccaccagcctggcttatgtgaaaatggagcccattgagaataaccgggttcccctggttgccctctgcaggctgactttgctgtagaggctttggccaaggcaacatatgagcgccttttccgctggatactcacccgcgtgaacaaagccctggacaagacccatcggcaaggggcttccttcctggggatcctggatatagctggatttgagatctttgaggtacagctcggtgggatcctaagagccatggtcttggttgtctgagatgggctttttcttggaggagtcatgattttggagaaaggcatgtagatggctactgtagggtaggaggctgtctagttaagggtggatcattgagggtataagagacagaaatccaacaggaaatgcattggtttctggaactgagaaggccagacatgtagctggatcccgtaggcagggtctgatctcccgccatcgttctctctctctctctgccttcctccatattggctccattctcaagcaggctctcccctcacgggggcaagatggctgccacagctccagactgcctctcagtaatcctggtaaaaaaaaaaaaaaaaaaaaagcacatatctcttttctaacagttccaaccaaaatcttggaattaagtctcactgactcttactcacctgaattgggctacatggtcacctccaagccaagaactgtttgcaggagcttgcaatacctcatgtagtagaaacatggatattggatcctttacccatgggtttgaagaaagttctcagagaaagggaaggttttttttttgtcttgtcttgtttttttttttttgagacagagtcttgctctgtcgcccagactggaatgcagtgtcacaattttgtctcactgctgcctccgcctcctgggttcaagcaattctcttgtctcagcctcctgagtagctgggactacaggagtgtaccactgtgcccagctaattttttttttttttttagacagagtctcgctctgttgcccaggccggagtgcagtagtgcaatcttggctcaccgcaacctccgcctcccaggttcaagtgattctcctgcctcagcctctcgagtagctgggattagtgccaccatgcctggctacttttttttttttttttggtagagacagagtttcaccctgttggccaggctagtctcaaactcctgatctcaaatgatccaccagcctcggcctcccaaagtgctgggattacaggtatgagccactgtgcttggccaatttttgtatttttagtggagagaggtttcgctatgcttgccaggctggtcgcaaactcctgacctcaagtgatcctcccgccttggcctccctaagtgctgggattacaatcatgagcactacacccagccaggaggttttaagattgatagatgtcccgaaagaagtgtactaccgagtcactttctctctgcgcctctgttttcacatctgtaaaatgtttccacatctgtacatgcagtagcgtgccttacgaggtttgtccatccatagatggttgtgcagatggaggagataagcatctttaaggtgtgtgagggccatgtgatatcaacttcaccagccctggtggactctaggcagcatgttttggggcctcagccctgtctgggtgctgggatggcagaacaggatgtgggcgggccatgggggcgctgtcgggtggagcttctgtggggctccttgtcttctgacttcataccaagatgctcacgccccgcccccacgccatgtgctcaggtgaactccttcgagcagctgtgcatcaactacaccaacgagaagctgcagcagctcttcaaccacaccatgttcatcctggagcaggaggagtaccagcgcgagggcatcgagtggaacttcatcgactttgggctggacctacagccctgcatcgagctcatcgagcgaccggtgaggggcacgtgggcgtgcggggctccgtcacaccttgtacacgtgtgtggcctctgtggagccgacgtggaccccacactctccccatgcacatagcattcccccacccaatccatcacccagtcctgaaaggctgtaagctgaatccttgtgaactcttacaatttccattaacccacattttcatatcaaaggtattttctttaatttctgccttccttccatcctcttttttcttcctttttttcttccctaccctctttcccttccctttccttctctgccattgctttttttttttttttttttttttttatgacatggtctgactctgttgcccaggctggagtgcagtggcacaatcttgcctcactgcaacctccacctccctgcctcaagtgatcctcccgcctcagcctcccaagtggctgagactacaggcgtgcaccaccacgcccacctaacttttgtattttcagtagagacagggtttctactaattagccgggcctggtggtgcacgcctgtggtcccagctatttgggaggctgaggtgggaggattgcttgagccctggaggcagaggttgctgtaagccgagattgcgccactgcattccagcctggataacagagtgagaccctgtctccaaaaaaaacttttctaacaggaaccctaggtgaattcaagtcaagcaacaaattcatttgcaagaattatgaactcggccgggcgcggtggctcatgcctgtaatcccagcactttgggaggccgaggcgggcggatcacgaggtcaggagatggagaccatcctggctaacacggtgaaaccccgcctctactaaaaatagaaaaaatcagccgggcgccgtggcaggcgcctgtagtcccagctactcgggaggctgaggcaggagaatggcgtgaacccaggaagcggagcttgcagtgagtcgagatcgcgccactgcaccgtctgcctgggcgacaaggcaaaactctgtctcaaaaaaaaaaaaaaaaaaaaaagagttatgaactcttcatgatgttgcctgcgtgttgcccactagggggcggcagcaaacattatgttctgccttccatccctgttactggtccattgggcacagggtaatttgaaggtagatttggaagcatgggggtcataaactcatctttatatgtgggcaaatacagtatcagatctcggcggatgcccatgcgttgtgtatagttggccagctcttcatggaatgcctgaggttgggtgttctctctgattcaagccctacttgtctcccacagaacaaccctccaggtgtgctggccctgctggacgaggaatgctggttccccaaagccacggacaagtctttcgtggagaagctgtgcacggagcagggcagccaccccaagttccagaagcccaagcagctcaaggacaagactgagttctccatcatccattatgctgggaaggtaccagccacagggcccaggggactctgtctcaggggacccccagtggctgctcagcgcagagacagtctgagagtggcagaaccttgggctgcctggaaactgcaaagccatctgctgctaagcgaatcccaaccaagtcctattcgtaatttgtctacgcatctgtaaggcatcagctgtagccactctcatgttttccaaccgtgacgtccagacagttatttctttctgtttttgttggagacagggtctcgctttgtcgcccaggctggagtgcagtggtgcgatcatagctcactacagcctcaacctcctgggctcacacgatcctcctgcctcagcttcccaagtagctgggactacaggtgtacaccaccatgcccagctaaaatcttttttcctttttgagatggaattttgctcttgtcatccaggctggagtgcaatggcgtgatctctgctaactgcaacctctccctccgggttcaagagattctcctgcctcagcctcccaaatagctgggattacaggcacctgccaccacacccagctaatttttgtatttttagtagagaagggtttcgccatgttggccaggctggtctcaaactcctgacctcaggtgatccacccgcctcggcctcccaaggtgctaggattacaggcatgagccaccgtgcctggccgcccagctaaatttttaaattatgtatagatatggggtcttgctgtgttgcccaggctggtcttgaattcctgggctcaagagatctccctgcctcggcttcctgaagtgctgggattatgagcacgagccactgtacctggcctcagcctgcttttcttgtatagactctaaatccttcctgctacaagttatacccaacaggcggggccaactggaatggggtgactaatacatccacacctggcttcaacaaaaatctcccatgtcacggtcttgagtttgctattgccagcctgctctggccagggaaatctatgatagttgtattcatcatcatcatcatcatcatcaacatgccttggctgttattgtataggcccttgccctgtggctctcaagagtcctggataatgtacaaaggacatagcttagtctggcttgcagaattgtagtattctattgactcctcagtacctccactgcatcatgggcacaaacaatgctctctaccagggcctggcaacagagtccgatctggcccacagcttgttattgtaaataaagttttattggaacacagccatgcccatttgtatgcataatgtctatggctggctgcttttgtatactacagtgctagagttgagtagctgcgacaaagactgtatgacttggctgggtgtggtggctcacgcctgtaaccccagcaccaaggcaggtggattacttgaggtcagcagtttgagaccagcctggccaacatggcgaaagcccgtctctgctaaaaataaaaaataaaaaaaatttaaaaattagccagctgtgagattacaggcacacaactgtaacctcagctactcaggaggctgaggcaagagaactgcttgacccaggaagttggaggttgcagtgagctgagactgcaccactgcactccagactgggcaacagagaaccactctgtctcaaaaaccaaaacaaacaaacaaacaaaacattgtatgacttgccaagccaaaaatatctactatctgggccttcaccaaaagtttcccaactcctagcctatattcaagggggtatatgttcctttaagcatatagagacaacacttttcttttccctacttcatcagtggattttttttattattattttcagtcttctctcagatcaagcctacctattatcctgataacccacatcccatgataacccagcaaagctgtattatcagttcctttcatttaatattcaccatagtaaaaattacggctttgggcattgtcattgtttgagtcaggaatgtaaaaagcctatatgtcctttttctgtatatccatatatcaggatctctgagttacaaattatgctcattagagagtggaaaataggatgccatgcttaattaatttatttatttaattattttgagacagagtctcactctgtcacccaggctggagttcagtggcgcaatctcagctcactgcaatctccgcctcccaggctgaagcgattctcctgcctcagcctcccgagtagctggcattacaggtgtgcaccaccatgcctggctaattttttttttttttttgtatttttagtagacatggggtttcaccatgttggtcaggttggtcttgaacgcctgacctcaaatgatccacccaccttggccttccacagtgctgggattaccagtgtgaaccaccacgcttggctgccatgcttaatttctaaaccaggatgattgggaagatgatgaggggggagttttgcatgtcggcaggagggcatctgccgtcatgaaatctcttaatagtgtataactcacaggtactgtgctggcttaggaggagggaggctaccacagcagcgttagtaggagaatatggaatggaaactaggctttcccagcaatggctatcactggctgatgtcctactacgtgggcacaggtccctgggctgttggtctcttcactggtgtttgtggagtcccatcatggtggtcataaacgtcatttcctctctgacctcagaagatctggaaggacaatgggagggctggggtcctggccttggtttctaagtttctagtttcccaggggttctgaccagcagggtgtccttggcaggtggactataatgcgagtgcctggctgaccaagaatatggacccgctgaatgacaacgtgacttccctgctcaatgcctcctccgacaagtttgtggccgacctgtggaaggacggtaaggccttctctgctcgggtccatgttctgctttgagctggagaattgaacacccaagtcccccgactctcacacctgccccaggaggggaggcctttacatgggggcaggggaaggaagagcattggcatgggctggtgatgtctcgttgaaacaatttcttcctgagtgggggtccctgagcccctcaatcctacatgtcccgaggggattgaggtcctgaggtcagggctcaggcaatagaggagaaacagcatgccaggcacggggagttagactgccctgtccagagtcagaaggacttcactgtatcttgtctctgccacctcctagctctgtggtcttggatgagtcacttgatgtcattaagcttcattgtcctcattagtaaaacaggagatgcaataatagttgccgtctctactagaggtattatgagggttaaattagaccagtgatgctcaaactcaagcaggcatcatgaccccctggaaggctttgtttatttatttagggacagagtcttgctttgtcacccaggctggagggcggtggtgcaatcttggctcactgcagcctccaccttctgggttccagtgattttcctgcctcagcctcccaagtagctagcattacaggcacacaccaccatacctggctaatttttgtatttttagtagagacggggttcccccatgttggccaggctggtctcaaactcctgacctcaggtgatccgcccacctcagcctcaaaaagtgctgggattacaggtgtgagccactgcacctggccctctttggagggctttttaaaacccagatggctgggcctaccctaagatctaattctgcaggtctggggccagggatggggcgggcctgaaaacattcatcccaggtgatgctgctggtctagggaccacactccggctccctttgagaaccagtgaatagatgatccctgtgaagagctgctggagtgatgatgaggggagggggtttgctgtttgtccctggccatcagtgtccacagcaggttttattcttggcacagggcccatgggcctggggcttacaggactggtctccccttgttttaagcatgctaaaaaaagggctccaggaggggccagctgtgccctaaccatatgccaggctctgggcctagggaacaacatcgcaccctgggtctgtgtcatcccaggacacatgatgaagcctgtagtccctcctctgcgggacccacagtcttgtgggagagatgagactctcaaagacaagcagagagacaagcatgaggctgcgcatggtggctcacacctgtaatctcagcactttgggaggctgaggcaggaggatcagttgaggtcaagagttcgagaccagtctggccaacgtggcgaaaccccatctctactaaaaatacaaaaactaactgggcgtggtggtggtaatcccagctactcgggaggctgaggcaggagaactgcttgaacctgggaggcgcaggttgcagtgagctgagattgtgccattggactccagcctgggcaaaagagcaagactctgtcttgaaaaaataaaactaaaaataaaaaataaaaacaaaattagccgggtgtgctggtgggtgcctgtaatcccagctactcaggaggctaaggcaggagaatcacctgaacctgggtggtgaaggttgcagtgagccaagatcgtgccactgctctccagctgggcgacagagtgagagcttgtctcaaaaaaaaaaaaaaaaaaaaaagattgttacacagaatctgagtagaaggtgaagaaatggtgccatccatggcctgtgggttgggcttggcatgtgcaggacctgctgggctggtagaaaaagaaccttggaggtgatgatgatgatgatgatgatgatgatgatgatggccgggcgcggtagctcacgcctgtaatcccagcacattgggaggccaaggcaggggaatcacctgaggtcaggagttcgagaccagcctgaccaacatggagaaactctgtctctactaaaaatataaaaaaaatgagccgggcgtggtggcgcatgcctgtaatcccagctactgggaggctgaggcgggagaattgctggaacccgggaggcggacgttgtggtgagccgagatcacgccattgcactccagcctggccaacaagagtgaaactccgtctcaataaaataaaataatgataataataataataataataataataataataataataatacctactttttgttgagcacttactgatgtgccaggctatctcggagtgtgtgctgtatcttctgcctcagaatatttcttccgtggatacctacatggttacccactcatttcttgctggtttctgctcaaatatcaacttagcagagcccaccacctccttgtctaagagagcaccctcttcactctctctccgctttaccctatttttatttttctacgcacacctcactactcaagatattccatacttaacatctgtgatctctgtctgtctccttccctgtgatataagcggggtgagggggccgggtctttttttgttcacagcagtgtccccagggcctggagcacagaaggtcctcaataactatttgttggtggatgaaagattggaggctggcagggaataagtgccttctgtgccttatttttttttacccctgccctagaaggtagacggtattattacctcccttttgtagaaagggagactgaggcacaggatagtgccaagccaaggctagtcagtgagtggacagcgagagcaggcttgactcctaggtcagcgtgactccatcacagggaatttgttctttctgccactcaggtgctctcaggatttccccaatagacaatacttggaaaccctgactgccgaaggaggcgttggtgatggaaggaaagattggagtgggcaggttggtgggtggggctggggctgagcctctggcctatttaggggtgggtgggccagaggctgatgccaccctggctgtgccccatagtggaccgcatcgtgggcctggaccagatggccaagatgacggagagctcgctgcccagcgcctccaagaccaagaagggcatgttccgcacagtggggcagctgtacaaggagcagctgggcaagctgatgaccacgctacgcaacaccacgcccaacttcgtgcgctgcatcatccccaaccacgagaagagggtgaggcccgccgcccagaccctggggctcccagaagccagggctgtcccaagcggtcacagcgtccccagggcgccctctgcccccacctaccccgaggaccccattttccatgtggggaaggctatctgaatctcagacccattccccatccctggaggaaaaggaggaagggaggatgcatccagagacttttcagttgtggagttgctgtgcaggtcatccagccactcattcattcattatcccaggaagtattcactgggctctgccctgtcctgggtgctggggagcagtgttagaaaaattgtagcccttccctgtgggtttctcataatctggtgcaggcatcttcagcttggggcgattgtgtcctctatatggacatgctacagacatttttggttgtcacaaccaggagggggctgttagtcagcatctagtgggtaggggccagggatgccctaagcattgtacaatgcacaggatggtccctcaacccccagcacagaatccctacaagatgccagtagtgctgaggttatgggagacacggggagaggtaaacatacagctgatgatggtgatggaatgtggtcagttaggagaacaccaaagagccagggctcctcccacagcctcaggactcagagaaagcttctggtgaacttgaacgttaagaatgtgtggccatcaacttggtgacatggaaggcagggtggggcctaggataagcagggggcctaggataagcagagggcccaggctaagcaagagtgtggaggtgagaagtgaaggaactaggtaagaaaatgctagatagtgtccaggcgtgttgctcacgcctgtaatcccagctactcaggaggctgagaaacaaaaatctgttgaacccaggaggcggaggttgcagtgagctgagattgcaccacagcattccagcctgggcagcagagcgagactccatcttaaaaaaaaaaaaaaaaaaggaaagaaaatgctaaataggtcatttcatgttgcaaatgtgtgatggcatgaggtaggaatcagatggtgtgaggtaggattgaggctgaatgggtaggcaggggctagatcgtggtgctccttgtgttctttctggagcttggccttctctctctaggcatgccattgggggtgttaaagcagggctatatcatggtcagatttacattttaggaagtgaatgagggggctgggcatatgctagctcatgcctataatcccaacactttgggaggttgaggtgggaggatcacttgagaccaggtgttcaaggctagcctgggcaacatagcaagaccctatatctacaaaaacatttttaaaaattttccaggcatggtagcacatacctgtggtcccaaatacttgggaggctgatttgggaggatcacttgagcccaggagtttgaggctgcagtgagccatgatcgcaccactggactccagcctggctgacagaatgggaccctatctcaaaaaataaaaaggacaaagggattgaggggagaggcaagaccagagagagagaccaggtgggtggtttctgtggttgtccaggcaggagaagatagtggagacaatggtggtgaagagaagtgggggggttgggagatatttgggagctagaagcaatcaaactgctgatggacaggaagtgagggagacgaggtgatgaggaggaagccccaggttccagccaggcgatgctagtgtcaccaagaaccagagagatcatgaggcagccattgccgaagcaaagagatgaaaacccagaggggggcactgctttgcccctcggccctcagctaagccctccttgggtgcttctgttggtaccctcatggcctggccaggtgggtcatccaggtaggaggtttggggctttgctgcgccatggtttctggccccagggatccactgccctctttgacctttgcagtccggcaagctggatgcgttcctggtgctggagcagctgcggtgcaatggggtgctggaaggcattcgcatctgccggcagggcttccccaaccggatcgtcttccaggagttccgccaacggtaagtcccaaggtctggcccaggtagggcagggggtgagcgggactgggtggaggaatggatgctggaggtacccggggtgacttctgctctgtgtttcaagctacgagatcctggcggcgaatgccatccccaaaggcttcatggacgggaagcaggcctgcattctcatggtgagcccagaagtccaccagagacctcccaacctctggccgcaagccacctgctgctcttggtgggaccgttcttacccatgtcatcactggccaaatggcacagtggaaatcaggagctcttcctttccttccttttgcagatcaaagccctggaacttgaccccaacttatacaggatagggcagagcaaaatcttcttccgaactggcgtcctggcccacctagaggaggagcgagatttgaagatcaccgatgtcatcatggccttccaggcgatgtgtcgtggctacttggccagaaagtaaagatgctttcctgcatcctaatacctcaaacgcgaatcacaaacaggggcctttctgttctgattccctgattctaagaggccacctgtttaagatgcatcattgactgaatgacagccttttcttgaaggggaagaaatgcttctactttaaataaatgtaccaagttacgagtgcaggaagggaacgagttttagacctgggttctcatcgtggatgccccagtttttgctgatgaaccttgggcaagttactctacctctctgagcttccagttttttagctggaaactgagcataatcattttgacctcagagagctgttcatgaggtgtcactaagataacgcatgacgagagcttagaacagtgcgtggttctcaggtcagaaatgattgttgttgtttttacctccctccctcactccttccttccctccctcccttccttccttcctttcttcttcctttttgagacagagtctctctctctctctctgtcgcccaggctggagtgcagtggcgcagtctcaactcactgcaacctctgcctcttggactcaagcaattctcgtgtctgagcctcccgagtggctggaattagaggcgcccaccaccacactggcctaatttttgtatttttagtagagacaaagtttcaccatgttggccaggctggtctcaaattcctggtctcaagtgatccacctgccttggcctcccaaagtgctgggattataggcatgacccactgcgcccagcctagacatgttagaattggataaaccattgaggaaagaggacttgacggtgtctagatccccgtgtcccagtgggatttataaggcagggttttggagggtgtgatgtcccagctgttctgtgaagactgggagccggggaagggttcgggttccttaatgaaagtcataccccagggactgcagggacaggtggggtcgctctctgtctggggtgtgtgttgtcattgggcagagaccacaccctcaccagtaggaccctgatgtgtcaggttcattcattgacacatggacccaagatggtcaaggccagctttgggagctcttggccctcccgcaacagacctaacttgtcaagtttcgttactaagttccctgttgctgtccttcctggataactggggcaattttattcttaaagttttcctgtgtccaagatggcagccaagcagggaagacagaattacgttcactgttctatcgtttctcaatctatcgatagcccttaaacgggaagagtgctggttcagggtcacagtgtgaaattcctaaaacaacccaggagagaataggtttgacagggctgggtgtggtagctgacacctgtaatcccaggcactttgggaggccgaggcaggaggattgcttgagcccaggagtttgagaccagcctgggcaacatggcgagacccctatctctaccaaaaaaaaaaaactttaaaaattagctgggcatggtagcatgtgcccgtagtcccaactacttgggaggctgaggcaggaggatcatttaagcccaggaatttgaggctgcagtgagccatcatcacaccactgcactccagcctgggccgcagagccagaccctgtctctgaaaataaacaaataaataaataagttagtcagaaacagctggtgtaggctgggcatggtggctcctacctgtaatcccagcactttgggaggccaaggtgggtggatcacctgaggtcaggagtttgagacccacctggccaacatgggaaaccccatctctactaaaaatacaaaaattagccaggcatggttgtgggcacctgtaatccaagctactcaggaggctgaagcaggagaatcacttgaaccccggaggtggagtttgcagtgagctgagatcgtgccaccgcactccagcctgggcaacaagagcgaaactctatctcaaaaaaaaaaaaaaaaaaaaaagaaagaaagaaaaaagaaacagctagtgcagctggggagtacgggagcccccttaggaatgatgcacatagttgtgttttctgagtggtgtttggatctcagctaagtccagggcatgttgtgagccctgggtcttccttgtccactgaaaaaggctctgtcctgtagatgatttaagttgtttgcagccagacaacacatgtgtcacacagggtttctggaagaacctgagttggggagattggggcatgtccctgtgcaggttcaggatgctgcagggcagggctctgttgacagcagggtgtggcttcatgacccccgcaccttctcttcccccctccctagggcttttgccaagaggcagcagcagctgaccgccatgaaggtgattcagaggaactgcgccgcctacctcaagctgcggaactggcagtggtggaggcttttcaccaaagtgagtgctctgccccagcccccttcccaggggcccccagccctgcttcttcactctggagccttcacatttgggacaggaggtggtcgcaagtgggtgtggaatggagggctcgaactcagaccttgagcattggcggttctctggcccgaggaggccctgtcctttggcacataggctatagccaggaccttaacacaaagtattaatatttccatccgcactggaatccctcgtgtggcccatttatagccacacccacttcctccgtagccatggaaaccactctgttctccagttctgtaattttgatggttcaagaatgctgccgggggcggcggctcacgcctgtaatcccagcactttgggaggccgaggcaggcggatcacttgcggtcaggagttcaaaaccagcctggccaacatggcaaaaccctgtctctacttaaaatacaaaaattagctgggtatggtggcaggcacctgtaatcccagatactcaggaggctaaggcaggagaatctcttgaactcaggagacagaggttgcagtgagccaagatcatgcctgcactccagcctgggtgaaagattgagactctgtctcttctttctttttttttttatttaaaaaaaaggccaggcacggtggctcacggctgtaatcccagcactttgggaggccgaggcgggtggatcacaaagtcaagaaatcaagaccatcctggccaagatggtgaaaccctgtctctactaaatgtacaaaaattagctgggcgtggtggcaaacgcctgtagtcacagctactcaggaggctgaggcaagagaatcacttgaacctgggaggcagaggttgcagagagctgagatcgcgccactgtactgcactccagcctggtgacagagcgagactccgtctcaaaaaaaaataaaacaaatattctatacatggaattagagagcatccagactgttgcatgtatcaatactgcaggtttttttttttttactttttgcattttttgaaatggagtctcactctgttacccaggctggtcttgaactcctgacctcaagcaaccctcctgcttcaggctcccaaagtgctgggattacaggcatgagccacctcatctggccatagcatattattttttatttctggcagagtcagggcctccagaggactcaactggttcctgtagtggcactggttgcattgtccccatggcacaaagacatgctctgttgcaatagactaggcttctccttatatgcccttgagtgtatccactggtgcaaggctttttcaccaagcaaacagacattgagtgcctgctgtatcccaggcacatgctaggtgctgggggtgcagctgtgaacacacaccatggtccctgacctccatgaatattctagccgaattggtggggagtaaacaataaacagataatcacagagacagatacataatggcaaactgtgataagtgcatgaagcaagctgctggagtacatagcaggggcttccttgtgccaggcaggggcttgaaaacaaagagttaggaggcagcccagggaaggacagcagatgctgctttttggaaatgttcgtccccactgaaccaacttctgaaaaactatcctaagaaaatcgtcttagccaggtgtggtggctcatgcctgtaatcccagcactttgggtggccaaggcaggaggatcacctgggttcacgagttcgaaaccagcctggccaacatggcgaaaccctatctctactgaaaatacaaaaattagccaggtgtggtggtgggcacctgtaatcccagctactcaggagattgaggcaggagaatcacttgaaccgaggaggcagaggtttcagtgagctgagatcgtgccactgcactccagcctgggtgacagggcgagactccacctgaaaaagagaaaagaaaatcaagagttaagggcattcattatggccttatttacaatagcagaatttcagtgtccagtcctagctgaatgatgagttcaataatggttcatctatcaatggaatgttttcagctattaaaatgatggctttggctactgaataggtctgctaaaaaaaaaaaaaaaaaagacttctacctagctgtctagttggacactgtggcatgtgcctgtagtcccagctactctggagctggggtgggaggatcgcttgaggccaggagttcaaggctgcagtgagctatgattgtgtcactgcactccagcctgggtgacaaaacaagaccatcgctaaataaataaattaacttaaaagatggctatgtaaagttgtaagaatgatgtaacagcatggggtaatacatatcttataatttttaaaaaaattttatttgtggagacagggtctcactgtgtcacccaggctggagtgcagtggcacaatcgtggctcactgcagcctcagcctgcagggttcaagcgatcttcctgcctcagacccctcactagctgggactacaggcacacaccaccatgcctggttacttgtttttgtagagatggggtctcatgatgttgcccaggctggtcccaaactcctgggctcaagcgcttgcctcggcctcccaaaatgctgggattacaggcatgcatcactgttcctgtctgtatcatataattttaaataataaaagcagcctctacaactaggcagcatggtcttaagtctattttttaaacatagaaaaagagccaggaaggaaatgtaaacaatgttaataatgactttgatagggaggtgggtgggatatgaaagattttttttctcccttttgtccttggaaggaaatatcacttttcagcagtagttctctgttgggatggttctaaagtggggaagatgagactttttcctttcactttgtaccttttctggtgctctgatttagagctcctcagtcttgccactgttgatattttggggtgactaattctgttgtgggggctgtcctgtgcactgtagggtgtttagcagtatccctggcctctacccactggatgccagaggcaccccccaccccagctgtgacaatcagcagtgtctccagacaatatcccctagtggggatcggtgggggcaacattgtccctggctcggaaccactgatcgaatttattatgacaacatatccctttgccacaaaaacaaatgatgggctaaccgtgtgtgtgcaggtgaagccactgctgcaggtgacacggcaggaggaggagatgcaggccaaggaggatgaactgcagaagaccaaggagcggcagcagaaggcagagaatgagcttaaggagctggaacagaagcactcgcaggtacctgtatggatgcatggctggggttgctggggaacaggacttggccccgtggggctcacccgcctcctccccaccacctgcgtgcagctgaccgaggagaagaacctgctacaggaacagctgcaggcagagacagagctgtatgcagaggctgaggagatgcgggtgcggctggcggccaagaagcaggagctggaggagatactgcatgagatggaggcccgcctggaggaggaggaagacaggggccagcagctacaggctgaaaggaagaagatggcccagcagatgctggtaaggtgtcacaggggcagcccgtggtgggtagcaaatcacttgaccctcaccacaggcctgtggaggtgcatccagggatatgtgtccctgctgggacagatgatgagacgggggcttggagagggttggtcatctgatcaaggccacacagctgggattgggactggaacacagtgagcccactctgttctattgccctgccttgcatgtgctaaccccttttctcctaacagcaagcctgaatggaggataattgtatttgttagctattgctacataacaaaacatgccaaactcagcagctaaaaataaaaagtattgcatagtcaggaatttgagagtggcttaggtgagtggttctggctgagggtccggcctgaggttgcagtcaaggtgttggctgaggctgcagtcatctgaaggctcatctggggctggaggacccacttctacttggcttattcacacagctgttggaggaggcctcagttccttatcatgaaggcctctcccctcagggctgcttgagtgtccttccaatatggcagcagagttcccccagaaggagtgatctgagagaggagaaaggaagccgcaatgccttttatagcctaatctctgaagttacattccatcacttcttcctgatttttgttgttgttgttagaagcaaatctaacccccactcaaggggaggagaattaggctccacctttttggagtcgcaaagaacttgtggatagattttaaaaccaccatggtacctactgtgctcattttatagatgaggaggttgaggttccatgaagcagagcagcttacccaggtctttattttttttttttttttgagacagagtctcactctcttgcctaggctggggtgcgatggtgcgatctcagctcactgcaacctctgcctctcgggttcaagcgattctcctgcctcagcctcccgagtagctgggattacaggagcccaccaccatgcctggctaattttttttgtatttttagtagagacggggtttcaccatgttggccaggctggtcttgaattcctgacctcaagtgatccacccacctcggcctccaaaagtgctgggattacaggtgtgagccaccacgctcaggcctttatttcttccttttaggaggctacagagttctgggcatcttcaggcctagcccctgtattcattagtccccagatcaccacgagagtaaatctgttataaccaaagctgttactcttttccctccacaacaaaggaccttgaagaacagctggaggaggaggaagctgccaggcagaagctgcaacttgagaaggtcacggctgaggccaagatcaagaaactggaggatgagatcctggtcatggatgatcagaacaataaactatcaaaagtgagtaggggccgggtgcagtggctcacgcctataatccgagcactttgggaggccaaggtatgtggatcacttgaggccaggagtttgagactagcctggccaacagggtaaaactccatctctactaaaaatacaaagattagccaggtgtggtggccagtgtctgtaatcccagccacttgggaggctgaggcaggagaatcacttgaacctgggaggtagaggttgcagtgagctgagatcgtgccactgcactgcagcctgggtgacagagtgactctgtttcaaaaaaaaaaaaaagtggaatcaagtttctgcattaaaaacaacaggcttaccaggatcagggagattttggggatttgggactttcagttctcaaagcagaaaagcccttagaaaaccaggacaagctggtcaccgtagtcagtagtcactaaccagccccacctgcttttagttctttgagctggatgtcagcttggcccctactgtgagccaggctctgtgttagatgcaggtatgcatggtgaaggaggacccttcccttgtggggtttatactgtagtgagatggcaaataatcgtcatttaccatggtgatcagggctctgaaggaaacgttcaccatattttaagagtgcggcaggccgggtgcggtggctcatgcctgcaatcccagcactttgggaggctgaggcaagtggattacctgaggtcaggagttggagaccagcctggccaacacggtaaaaccccatctctactaaaaatacaaaaaattagttgggtgtgttggcgggcgcctgtagtcccagctactcgggaggctgaggcaggagaatcacttgaacgtgggaggcagaggttgcagtgagctgagatagcaacactgcactccaccctgggcgacagagtgagactctgtctcaaaaaaaaaaaaagaatacagcagtgggggatagaggaagggtattcatagaagacttcctggaggaggtgacatttaagcagaaacttaaagatgaaggagcagttagaggggagtagaagagcatctcagctggttggcccactgtgcaaaggccctggggcagggaagagctggccagtggcaggaatggaaggagggtacctttagctgaccatacaatatgagggacaaactggcacgagatgagaaatggccagtttttggaaattgttatgggacttctctttaccatttaaaactctagttgtattttgttataatgtgggtttttctttcaactgtttacatggaaatcactaaaagtgaaacatagattctagagaaaagaaaaatcctaaagctatctctttctctttccccaaaaaggaacgaaaactccttgaggagaggattagtgacttaacgacaaatcttgcagaagaggaagaaaaggccaagaatcttaccaagctgaaaaacaagcatgaatctatgatttcagaactggaaggtaaaccagctaccaagagatttatttttattttattttattattttttttagagatgaggtcttgctctgttgcccaggctgcagtgcagtggtgcgatcatggctcactgcagcccgaaactcctaagctccagtgatcctcctgcctcagcctcctgagcagctgagactacaggcgtgcatcaccacacccagctaatttttttttattttttattttgtagagatggggtttcactatgatgctcagtctagtctcaaactcctgggcccaagcagtcctcccaccttggcctcccaaagtgctgggattataggcatgagccactattcctgggcttgaatgggtatttttaaaagcaggaaaatcagaaaggaaatttgaggatggcagatcatcccatgagtgacaactaactctatgccacctctcgaaatcacccttagtcatcacatgcactaataatatgataaaagggctgggtgcggtggctctcgcctgtaatcccagcactttgggaggccgaggtgggcggatcacgaggtcaagagttggagaccagcctggccaacatggtgaaaccctgtctcaaaatacaaaaattagccaggcgtggtggcgggcgcctgtaatcccagctactcgggaggctgaggcaggagaattgcttgaacccgggaggcggaggttgcagtgagctgagattgcgccactgcactccagcctgggcaacaagagcaaaactccatctcaactaataataatattatgacaatataaggtgctgttcatcgggagataatggtccagaccgtgactatgatggttactgattgggggatgtgttcatctcctccgggtaaaatgcctgggcaggaaggctcatttccgggcatctctctggggcctccccttcctgaagagcaccttggtttttgcagtgcggctaaagaaggaagagaagagccgacaggagctggagaagctgaaacggaagctggagggtgatgccagcgacttccacgagcagatcgctgacctccaggcgcagatcgcagagctcaagatgcagctggccaagaaggaggaggagctgcaggcggccctggccaggtagcggggctggcaaggggcatttgctgtgtgtccatgtatcccctgggcccctgctcattcgctcattcgcagtggctgtcttggtcaaggcggccccaggcccttggcatgaacttcgtttcccaggccaggcctcccacaagccttctcgaccctgttcactcccccagatcctcaccttcgactttcttctcttccctgcaaacacatcatgtctttgcagttgatctcacctactcccatggtgttgctgctgcctcttcgacatccaggcttttctcatctagacccccttctgaatttccgattgcccaatgagtcaatttccaccgtcatctcaaacacccctgtctaaggcgggaatgaccttcctttccccagcccctccctctaagggccctcttttttgtgaacaccaatctcctcctttgtttctgccgacccacagcaagcagcaaccttcagattctgccagtccttctaaatgtcccccacccatttcctctggtttttccctcttcctggctcttagctggatttacactaatgctaatactgcagcagccactatgaatgattatttacctgctcactcggtgctaagttcttttcaagcaatacctttgcagacacctggccaggtgtactgccggtgtctttgaggaggaagctgagcctcctaggggtaacgcaacaggagcaatgtcattgcttctaagaggcagagctgggatttaagcctcaaagctttctgattgatcccctggcctggctcttttgtcggccaatttgtgctatgttgacagtgctacggtgatgaagggaaagcatctctctggggcaggaacctgctcacaaaactttgctggctggatgcagtggctcacgcctgtaatctcagcactttgggaagccgaggtggggggattgcttgaggccagcagtttgagaccaacatgggcaacatagcaagaccctgtccctacaaaaagttaaaaaatgagccaggcatggtggtgtgtgcctgtagtcccagctactcaggaggctgagatgggaggatcacttgagcccaggaggttgaggctaaagtgagctatgatcatgccactgcactccagcctgggcaacagagcaagaccctgtctcaaaacaataataacaacaaaacaaaaacctaacttcactggcttactagggaaaatccagtttccttagcctcaccctcagagcccatccaccctctgcagtctcaccccaacccaactatttcactttctctcttgttgctgccctttcacaagtacagtaaaatcaaagtgcttgcctctcctgcagcattctgccatttaacagggcttcttgcagcccaccttgatctctggtcaccacctccaccagatgcagagccccagtctgaatatcccccgcaagcagtggctggccaaatgctgtgcatggggcgggtactcagtcactgagcaaatgcagaaagaacagacagttgccagggaagaagaactgtccaacattcagaaagcatctacacagtccctactgtgaccaggtaccttgccagtctggggtcaatgctttgcattcttgcacacacatgcacacacgtgcatacacacgtacacacacccatgcacatgtacaacctgttttgatgtcagaccttggcactcacatcctatgttaatctcatatagtctggcatgtcaagaagcagacctggggacatggatagaaggtgtttgatgtctctgcaacataactgtctggtcccagaaaagtttttggccacattgtaagagaggaaaccaagggacctgggggttcattctgctgggtctctccctggaaggcttgacgatgaaatcgctcagaagaacaatgccctgaagaagatccgggagctggagggccacatctcagacctccaggaggacctggactcagagcgggccgccaggaacaaggctgaaaagcagaagcgagacctcggcgaggagctggaggccctaaagacagagctggaagacacactggacagcacagccactcagcaggagctcaggtgaggggcccatcaatcccaccatcctgctatcccactgcaccaatgggatgggggcagaagaggggacaaacccaaagcaaatcgtgcatcagcccctgtgcatttaccttcctggccgcggtttgctttaacttatagaagcatggttggctgtttcttttttttctttcttttttttttttttttgaggcagtctggctttgttgcctaggctggagtgcagttgtgccatcttggctcactgcaacctccacctctgagatttaagcgattctcatgcctcagcctcctgagtagctgggattacaggtatgtgccaccacacccggctaattttttgtttttagtagagatggagttttgccatgttgcccaggctggacttgaactcctggcctcaagtgatccacccacttccgcctcccaaactgctggtattacatgtgtgagccactgcacccgaccctcatcatcttatttctcatcagaagagtagtatataccagggatgtacaatcttttggcttcccttggccacattggaagaaaaagatttgtcttgggccacacataagatacactaacactaataatagctgatcaactaaaaaaattttacaaattggaaaaaacatctcatactgttttaagaaagtttatgactctgtgtcaggctgcattcaaaaccatcctcattggtaagcttggatatactcagagaacaatttgaaaactatagaaaagcagacataaaaaaaaatcacctttagggtcgggctcacgcctataatctcagcactttgggaggccaaagacaggtggatcacttgaggtcaggagttcaagaccagcctggccaacatggtgaaaccctgtctctactataaatccaaaaattacctgggcgtggtggcgcatgcctgtaaatcccagctactcaggaggctgaggcagtagagtcacttgaatctgggaggcagaggttgcagtgagctgagatcgcaccatcgcactccagcctgggtgacacagtgagtgagactccatctcaaaaaaaaacaaaaaacaaaaaaatcacccttagtcacaccagttaacattcttgagaaattccttcctgtctgtgtgtgtatcagtcagtccccaagctccaattcccaagtatgtgtgtgtatcacttttgtgttaaattttaaaaataaaattgatcagattggttttcaattgaagattcacttcaaatgaacaaacaataacaaactgcctgccagatcacgaatcctgactctagtgaaactaggtcattgattcattcagtaaacacataaatgtattttgatgcaatctgtggtgttggcatagcatgtatcatagcatatagctatgctagctgtgccaacaccatataccctggggtttacttcccccactttgggttttgtgcagtgtcacatgcacatagagcacagcgttctgctcccttgccgcttggcctttgatacagaagagcccagtgcatgggccaggtatggtggctcatgcctgtaatcccagcactttgggaggctgaagcagacagatcacctgaggtcaggagttcgagaccagcctggccaacatcatgaaaacctgtctctactaaaaagacaaaaattagccgggcgtggtggtgggcgtcggtaatcccagctacttgggagactgaggcaggagaatcccttgaacctgggaggcagaggttgcagtgagctgacatcattccactgtactccagtctggacgacggagcaagactcgataagaaaaacaaacaaacaaaacaaaaaaccaggctgagtgcggtggctcacacctgtaatcccagcactttgggaggctgaggcgggtggatcacctgaggtcaggagttcgaaaccagcctgaccaacatgttgaaaccccatctctactaaaaatataaaattagccgggcgtggtggtgggcacctgtaatcccagctacttaggaggccgaggcaggagaatcgcttgaacccgggaggtggaggttgcagggggccaagattgcgctgtcgcactccagcctgggcaacaggagtgaaactccatctcaaaaacaaacaaacaaaaccatggactcaaggtcaaggtttagcttctaattctggctccatcacacaatggctgtgacaccatgggtaaaactgcttaccctctcttagccttagtttcctcatttgtaaaatggaaataataacacacctgcctctttgggttgctctgaggattagatgatgtatataaaaaacttagctcagggcctggcatatagtaactgctcattaaataagagccaacattaatatttaagcaaaattttgcagttcacagacatcctttcaattctattactttgtgtatttgtttgccagtcattacagatgtcctaggcaggtgatatgctccacattttgcagctgaggaaattttaggtccagagatgttaggtgaatgacccaaggtcacacagctagagaggggtggtgatgaggactgcagctctgggtcctggaagagctctcattcttttgcacggcactgagatgaccctctgtctccacccaactgccattcactgtgttcctcccaccaagggccaagagggagcaggaggtgacggtgctgaagaaggccctggatgaagagacgcggtcccatgaggctcaggtccaggagatgaggcagaaacacgcacaggcggtggaggagctcacagagcagcttgagcagttcaagagggtaatgctttttggtgatgctttttggtgatgacacataagagtgacatcagcagcctcaaattactacaggtcagggtctgcataaagacaaaaaacaagttacataagattctaatgatgatgatagcagcttatatttatttacaaaatgcttcccatacaggctgggtgaggtggctcacgcctgtaatcccagtacttggggaggctgaggcgggaggatcgcttgagctcaggagttggagaccagcctgggcaacatagtgagaccttgtttctactaaaattttaaaaaagtaggccaggcgtggtggctcaagcctgtaatcccagcactttgggaggccaaactgggtggatcacctgaggtcaggagttcgagaccagcctggccaacatggcgaaaccctatctctactacaaatacaaaaaattagccgggcgcggtggtgcatgcctgtaatcccagctactcgggaggctgaggcaggagaatcacttgaacccaggaggcagaggttgcagtgagcagagatcatgccattgcactccagcctgagcaacagagcaggattccatctcaaaaaaataaaataaaataaaatattggccaggcctggtagtgcattcctgtggtcccagctatttgggaggctgaggtgggaggatcgtttgagcctgggaggttgaggctgcagtgagccctgtcatgccactgcactctagcctggacgacacagtgagaccttaatcaaacaataaaaataggctgggcacggtggctcaccatgtctgtaatcccagcaatttgggaggcaaggcgggcaaatcacttgagctcaggagttcgagaccagcctggccaacatggtgaaaccccatctctaccaaaaatataaagaattagctgggtgtggtggcatgtgcctgtaatcttagctactcgggaggctgaggcaggacaatcacttggacccaggaggaagaggttgcagtgagctcagatcgtgctactgcactccagtctgggcgacagagtgagccgccatctcaaaaaaagaaaaaaaaaaaagaatgaatagaaatgcttctcatacagtatgtcaattaatcttcacaaccaccctgtgagacgtgtactattaaactcattttacaagcaaagaaactgaggtcctaggtgcctagaggtgaagagacttacccaaggtcacactgctggtaagtgacagagccatgatttgcacccaaacagtctggtcctagaccccactttctggcctctacaggactgaaggcctataggatgggtggggcctatcaatatactgcccttcagggataagcaaaggtgtaacaacactttcggggagatttaaatgaaacttaaaactgggatcattctatccactttaatttctctgcagactggaggaaggccaggcatggcggctcatgcctcccgtaatcctaacactttgggaggccaaggagggaggattgcttgagcccaggactttcagatcgcctgggcaacatagcgatttttcttttgtaaaaaaaaaaaagactggaggaaacttgtcattatttgatttcaatggcagaacagctctctccggcataatttgagaatgactaggtcaaatcactctcccgttgttggaactctttgcggtgtatgggagtgggagctggtaaatagcagtaccgaatgctgaatcttgggtgctcttctctcctttggggtagtgcctgtgcttcattccccagggtaagttttttagcttgcgaccttcggccagattgttttcctgaaagcctgagttacattaccctcagcgttgcagctcctccacatccccttcagtggaagcttttggttctgctagattaagtgggtgcagcattgcctaaaaattttggggaatttgcatttggttctatcactagtgtattggtccgttgttgcactgctctacagaaatacccaagattggattatttgtttattttttgagcagtggagtcttactctgtcactcaggctggagttcagtggcgtgatcttggctcactgcaacctccacctcctgggttcaaatgattctcctgcctcagcctcccaagtagctgggactacaggcacacaccaccatgcccggctaatttttttttttttttttttttttagtagagatggggttttgccatgttggccaggctgatctcgaactcctgacctcaggtgatccacctgccttggcctcccaaagtgctgagatgacaggtgtgagccactgcaccaccctgagattgggtaatttctaaagaagagaggtttaattggctcacggttctgcaggctgtacagaaagcatagcagcttctgcttctggggaggcctcaggaaacttaccatcatggtggaaggcaacggggaggcaggcatgttttacatgaccagagcaggcagaagagagagaatggggagctgccagacacttttaaacaaccagatctcatgagggcagcaccaaagggatagtgctaaaccattagaaactgcccccaaaggccgggcgcggtggctcatgcttataatcccagcactttgggaggctgagataggcggatcaccaagtcaggagttcaagactagcctgaccaacatagtgaaaccccatctctactaaaaatacataaaattaggctgggtgcagtggctcacgcctgtaatcccagcactttgggagcccgaggcaggcagatcacctgaggtcaggagtttgagaccagtctggccaacatggcaaaaccccgtctctactaaaaatacaaaaattagctggacgtggtggcggtcgcctgtaatcccagctacttgggaggctgagacatgaaaatcacttgaacccaggaggtaaaggttgcagtgagccaagattgtgccactgcaccccagcctgggcaacagagtgagactcagtttcaaaaaaaaaaaaaaaaaattatggttggaagagtgaggccccagacagaatcactgaccctccccatgcttggggttcattagacgtgaacaggagctagaagccaagcccattcccagccaggcctctttgggaagacgcagttattaagaccaccagcagacggcatgtccattactgacccgcacaaagcaggtagaggtgcaaacctctgcccatctcaggtgcagggaaacagaggcctttgcctctaacaacttgaattctgatgtagagacctggttccatctgcttgtgggggaaacgtttaacatcagctcctacctgggctccccaggccctcgtgcggtttggccccagttctggggtcttaggctgggctaaggtttctgggagcccatgtcccctagggtccccgcttcactgctttgttaccaccaagagactccctgtccccatctgaggtctggcagctcttagtcatgtcttggagggaggacgggcatccagggctgaccggtcaacgtccagcacctcccagggactatgggaagactgagtggtgggtctcgtcctctcgggatacttgcgcttctctttccccttctctacaacctggaaagaagcccctcaccgcgtcctacttttgcccaacacgcttttttttttgagacaaagtctcactctgtcgcccaggctggagtgcactggcgggatctcggctcactgcaacccccgcctcctgggttcaggcaattctcctgcttcagcctcctcagcagctgggattacaggtgactgccaccatgcccggctaatttttatatttttagtagagacggggtttcaccatgttggccaggctggtctcaaactcctgacctcaagtgacctgcctgcataggcctcccaaagtgctgggattctaggcctgagccaccgcgcctggccccaacacactttttttttcctgtagggcaactcacatgcctacaggagctggttccataaaataagtttcccttaactaggacagaagtagcagtgtcaatcacacgacacctgtgaaggacgggggcggtgaaaggtgactgccccacctgcagagccagccgctacttagatgtggcagattgttgccttgaaggaaagcaagaccctctgtttccagatctttcgttgttgttggttttttgtttttgtttttaagtttaggattactgaggcatatgtagtaaaatttatccattttactgctccattaattttaacaaatgtgtattgtgtaactaccaccaccacagtcaccacatagaatgttagttattgattgattgattgagatggagtctcactctgttacccaggctggaatgcagtggcatgatcttggttcactgcaacctccacctcccaggttcaagcaatacttgtgccttagccaccccagtagctgggactacaggcgtgcgccaccatgcccggctaatttttccatttttagtagagatgcagtttcgccatgttggccaggctggtctcgaactcctcacctcaagtgatccacctgccttggcctcccaaagctacttatttctgaaacagggtctcactttgttgcccaggctggagtgcagtggtgtgatcatagctcactgcagcctccaattcctgggctcaagcaagcctgccatccgcctcctgagtagctgggattgctggtgtgtgccccccacacccagctaatgttttattttagtagagatgggggtctcactacattgcccaggctggtcttgtactcctggccttaagcgatccttctgcctgcttcccaaagtgctggggatgacaagtatgagctgccatggcatgccttcaaacattaaagttttttgaaaaagaagctgggaatccagatttttatgtgacatttattaaaatgtcggcaactcatttttttaaaagtagtgaaagggtcaaaggggacatgtcagcaggttggataccgcttgtgggattccagattgcaacccatgagctttaggaaaatagaatccaaaatatcagctgggtgcggcagctcacgcctgtaatcccagcacttagggaggccaagatgggtggatcacttgaggtcaggagttcgagagcagcctggctaacatggtgaaacctcgtctctactaaaaatacaaaaattagtcgggcatggtggcgggcgcctgtaatcccagctacttgggcagctgaggcaggagaatagtttgaacctgggaggcggaggttgcagtgagccaagattgtgccacggcactccagcctgggtaacagagttaagactccatctcaaaaaaaaaataacaacaaaaaaaccccaaatctcttactggtgattgtgtgccccctgttgtgtgccttcctggacctctctgagggaggaaagggcagggcctgaaacgttctcccggccacagcctccctgttatccctcccctctgcttccttcgccaggccaaggcgaacctagacaagaataagcagacgctggagaaagagaacgcagacctggccggggagctgcgggtcctgggccaggccaagcaggaggtggaacataagaagaagaagctggaggcgcaggtgcaggagctgcagtccaagtgcagcgatggggagcgggcccgggcggagctcaatgacaaagtccacaagctgcaggtgaggaggtggcgcggtggtgtggtgggcagtgctgggtggtgcccagttctgtggggaggagcctcttcccggctcgctgaggtctctcttgctgcaaggcaagtcctttcctctagttgcgttcctggaggagaggcgatgatctccctgttcaattaaatattaaaaaaaccttctggccaggcacggtggctcatgcctgtaatcccagcactttgggagacagaggtgggtggatcacctgaggtcaggggtttgagaccagtctggccaacatggtgaaaagtctctactaaaaatacaaaaattagccaggcgtggtcgtgggcacctgtagtcccatctactcgggaggctgaggcaggagaatagcttgaacccaggaggcagaggttgcagtgtgcggagaccgcaccattgtactccagcctgggctaaaagggcaaaactctgtctcaggaaaaaaaaaaaaaaagaaaaaaaacccttccttttccaatttgataagtatttattgagcacctgctgtatgccaggcactgtgcttaatcctgagatccaacagcaaggaagaagagacactgtcgctgccccagtaggactccagccgagtaaggggaagggaagggaagggaaagacatgaataatcacacaaatgaatgtcaaatgatgcagcaaagggaaggcacatgatgcccaagtgtaaataaccagggggcctaacctgggggaggaggagccacgaaaggcttccctaaggagcatggataagtctaccaggcagagggaacagcgtgtgcaaaggccctgtggtaagtagaaaaattaggagagagacatacagccagtagagctggagtgcccagctggggttgggggtagggggagatagtacagagtggggttggagggggagcttgtacccagatgatgtagggcttttgagaacctattacatgtatgttgatccttactctgggcaatgtgaagctgttgaggggttttaagctgctgaatgacatggtctttttgtctttggtcttctttcacttggcatagccatttaccctgccttgccactcatggggacgtggccaaagttttcacaaatgtttaacatgtccacagccagggaccaaggggcgagggaagaattaagtgagatgtttttttctcacatgcagttgagagcagggcttttgccgccctcatataagcagtgtcaagatcattcatatcctccttgtcaatggaagagatggaggggtaggctaacagcctcaaagggacttatgcagagacactagggagtaaaagccagagaatacagagaggacgtttttacctttagggcctgcgtctctggctttggccatcagggtcaaagagtaggagtgaggaaggaagggatgggacagcatccctgggacgttcaagtaccatcctggtctcccttctccagccttagagagtggaccagccagagcacctcgtctggactctcagacctgctgctttgtctctaccaaccttggcagggatctaggatccatttagtgggatcaggtcccagtcaataccattggggctcaaataagttcttagaaccacagagtctagggccagggtcccaactcataggtgacggagttcccttcaagccacagattctgttttttttgtgtgtgtgtgtgtttttttttttttttatcagagtcccatacctcacgggtattttctcaatcagtgaacacctcaagtactagcccatgtgttttgagtaaaaagggctcctttcaacgaggatccccttctagaggctttgactaaccagtctcttggcacccttagaatgaagttgagagcgtcacagggatgcttaacgaggccgaggggaaggccattaagctggccaaggacgtggcgtccctcagttcccagctccaggacacccaggtgagtgtcctgccacatcatccaggggacctggggggtggccttcctcggggcaggtccctgggacctctttgcatcccttttgcaggagctgcttcaagaagaaacccggcagaagctcaacgtgtctacgaagctgcgccagctggaggaggagcggaacagcctgcaagaccagctggacgaggagatggaggccaagcagaacctggagcgccacatctccactctcaacatccaggtgcctgccccgtgtccttgcttccttcatgggtcctctcaacttctctgcgctgagatcccccgcaggcagatcgcggtggagtgttggtgcgatggtgcttgaccccccagcttcccctgctattgggtttctccaacgaggagacatggtcttcgcttctcagagtctgtggggccagggacaggggccactcatggtccccctctcaccctaccctggacgctgtccttgtagctctccgactcgaagaagaagctgcaggactttgccagcaccgtggaagctctggaagaggggaagaagaggttccagaaggagatcgagaacctcacccagcagtacgaggagaaggcggccgcttatgataaactggaaaagaccaagaacaggcttcagcaggagctggacgacctggttgttgatttggacaaccagcggcaactcgtgtccaacctggaaaagaagcagaggaaatttgatcaggtagagggcgtggggtgtcccccactctggccatggacgctgggttggggaatcagctctgcagagtatgacgcgtggctctggcctgtgcctgcatcccctctccactctgtggggagccatgggaggctgtcttatcttgtcttgggcgaccatggagcattaacgctaccaggtcacagtaaggatggcaaagaagccttgatgactgtgacttttctgggtaccagcaccatgagggtcacctgcacacatggtgatgccttagtttctagcctgaagaaggaatgaggtgcttatttattcactaaatgtatttactgaatacctattgagtagtattccaagtaattcagtttctatacttttaataccactcttccctaagatttcattctgtaaaattccaagtacacagcaaagttgacagaattgtacggtgaacacctttaaggccaccacctggattcagtcattgacactgtattatatgaactttatcagatacttattttgagacaggatctagctctgtcacccaggctggagtgcagtggtgtgatctcagctccccgcaacctccaccactgggttcaagcgattctcctgcttcagcctttcatgtagccgggattataggagcacaccactatgtctggctaatttttgtatttttagtagagatggggttttgccatgttgtccaggctggtctccaactcctggcctcacatgatctgcctgccttggcctcccaaagtgctgggattataggtatgagccactatgcccggcccacatatttatttataaagactaattctatctatcatgccttatctcttgggtacatttcagagcaaattacagatgtcagtacatttccccttccacacctcaacattgcatattaattagagtttatttttaaacacaattttgcttcttttggggtaaaacttacatgtgatgagattcacaaatcttaattgtacgataaatggagacccctgtatgacccaaacccctaaataccaacttttaagatacattattatttagtaaatatgatttagtttacaagtgactcagggttattctaaaaatcagtttgagaggccaggcacggtggctcacgcctgtaatcctagcactttgggaggctgaggcaggtggatcacttgaggtcaggggtttgagaccagcctggccaacatcgtgcaactttgtctctactaaaaataccaaaattagccgggcgtggtggcgcacgcctgtaatccctgctactctggaagctgaggcaggagaatcgcttgaacccagggtggggtggaggttgcagtgagccaagattgcgccactacaccccagcctgagtgatggagtgaaaaccctgtctcaaaaataaataaaatgaggattgtacagtgaggctaaatgccagatgcctgcaggttccctacccctccctgactgacctcctagtgtcaggattctagataacatcccagtttctcctcttcccatcagctacctctcctctgggctgtcagctcatcttcaatgcttcgttatctggttgaaggcctgaggttgcttttattttcctgtcacatagagtgtagtgcagtggcacacatagtgtgggatttttgtgttgactgtgccatttagaggtccctgtctttgctgaatactggaagtttggcttttggatgttacaatttataatctgctctgttctctctgaagatgagattaacgtgagcatggaatgttctctgagttgcttctccaagcagagagatatgtgtgcagggccacccatgcttaccatttccctactgaggctcttaggatacttttgtaagatattaatagctacttgtggccatgaaacaaactaataactagcttctggcagctttaaatctcactttgacctcagtgtgctctaagcaacgtgggcaggtctagtggtttcgaagcacaaggatttggccaggtgtggtggctcacacctgtaatctccgtgctttgggaggccgaggcaggaggctcacttgagggtcaggagttcgagaccagcctggtcaacatggcaaaaccacatctctacttaaaatacaaaaattagccaggtgtggtggtgggcacctgtaatcccaactactctggaggctgaggcaggagaatcgcttgaacccacgaggcggaggttgcagtgaaccaagactgcaccattgcactccagcctgggtgacaaagtgagactccatctaaaacaaacaaacacacaaaccaacaaaaaaaaacaagtcagctgatttctggctctgcataaggttgatgtagaagtcagaacgccagatgattatataaattactcccatagctaacctacactgcttacacctgcacctcaatacattcagcaggacacagggcttcccccggtatttacaattcagtgacgctgaccccggatatgcctagaagtcacctctgggtcttgtgttgtagttgttagccgaggagaaaaacatctcttccaaatacgcggatgagagggacagagctgaggcagaagccagggagaaggaaaccaaggccctgtccctggctcgggcccttgaagaggccttggaagccaaagaggaactcgagcggaccaacaaaatgctcaaagccgaaatggaagacctggtcagctccaaggatgacgtgggcaagaacgtaagtggctctgggtggtttttctcgtccatgtttcgcctgcccaccctctgtgctattcaccagtccatgcgaggctagctcctggcctttttcatagcgaactatcatcggaaatggaaggaggtttttggactggtgcaggggctgggaggggctgagaatggcagtcgaggatgggtctgagttggggggtccgaggataaggctggggtctgaactctcaggggtcatcttgagtcccggccatgcatcctgtgggaggccaaagccacctccctgatctcctgaggtgccgctcacggtgggtttctcaatcgtcttcatgaagttgagcctcatagaatggggctgcccgctctgccggcaggtccatgagctggagaagtccaagcgggccctggagacccagatggaggagatgaagacgcagctggaagagctggaggacgagctgcaagccacggaggacgccaaactgcggctggaagtcaacatgcaggcgctcaagggccagttcgaaagggatctccaagcccgggacgagcagaatgaggagaagaggaggcaactgcagagacaggtgcgtgctgccggggaggccagcagagggaggtcgggtggcctttttcattcctatcaccactctcatggttggtgtggaaacttcgttttctttatttttttttgaaacagagtctcgctctgtcgcccaggctggagtgcagtggcgtaatctcagctcactgcaacctccacctcctgcctcagcctcccgagtagcttggattacaggcgcatgccaccatacctagctaatttttttttttttttcagtggagacaaggtttcaccatgttggccaggctggtcttgaactcctggcctcaagtgatccattctcctgttggcctcccaaagtgctgggattacagacatgagccacccacgcccggcgtgattccgttttctcatctgcaactggggatgagatgcccacctcacaagggggctgtgctggggaaggggtgcagtgatgtgctgcctaggtgagccaaaggacctcccaggggcaagtggggcagcacacatctctattcctcgcccagcttcacgagtatgagacggaactggaagacgagcgaaagcaacgtgccctggcagctgcagcaaagaagaagctggaaggggacctgaaagacctggagcttcaggccgactctgccatcaaggggagggaggaagccatcaagcagctacgcaaactgcaggtgggtgacactaggagcttggggcatgggtggagggagggcacagttcccctcaggccaccgaagtcagcagagcgggctccaggaagcaagcctgcacctgccattggtgtgggttcagctggggtttttctggaaccattcaggatttggtggctgtctcctgccctgggtagggcagcattattaggtatttggccactgccctcagatcacatcaggggctcagcttctcaggcaggtctgtggagcccacccagaatggtgctcccagcgcaccaccagccacctggaactgagagccatgctcgtgcaatgggaacttctttgtggtcaactgcagaaaatccaaggggtgggtgtgcaaagctgaactgggcagcagaacttgggggagtaaggacatctgagcttgtcctccctgttgactcatgcaggctcagatgaaggactttcaaagagagctggaagatgcccgtgcctccagagatgagatctttgccacagccaaagagaatgagaagaaagccaagagcttggaagcagacctcatgcagctacaagaggtaaagcctcgccttgctaggagagcctcagatgcgggtgtcacggtagcaccccttggcagctccagtctgtgcattcccagatttcatttcgtcctcctctggggtccacctgtctagaaagacacacgcttccctcctctatgtattcacggggcctcccctgagctcagaggaagaacatgtactttcaagggtggctgagttgtcagggtggactcttggtggggcttggcctttccctggcagacaacagccttcctccctcccacctaggacctcgccgccgctgagagggctcgcaaacaagcggacctcgagaaggaggaactggcagaggagctggccagtagcctgtcgggaaggtaggaaactgaatggaggaagagggctctgaagcagaggatggggggacaggcagcatcctcgacccccattttattttttaaattttttcgagacagagtttcattctgtcacccaggctggagggcagtggcacaatcttggctcactgcaacctccacctcccaggttcaagcaattctcctgcctcagccttctgagtagctgagactacaggtgtgtaccaccatgcctggctaatttttatatttttagtagaggtggggtttcaccatgttggccaggctagtcttgaactcctgaccttaggtgatcctcctaccttggcctcccaaagtgctgtgattacaggtgtgagccaccgtgcctggccctggacccccatttcaatgctgctgctgacgaagcgtcctctgagattggggacagacccatggtggttaggttttccgtcagcgctttcatgcctgtttgggggtgtggctgctttcattcattcccaataagtagctgtgtggggagaaggggaggccaggaagagtcagggaggagtgtgctggtccccatcccaatcccagctttgctgacacggacccggcctgagtcccggctgtccacttcctggctgtgtaactacagatgagtcttctaatcttctccaagcctcagtttcacccattagatgatgagggcaatacccctgaggcatgactccaaggagggggcatcttttaaggcgggggagggtagaggcccccaccatggccgcccttcccccaggaacgcactccaggacgagaagcgccgcctggaggcccggatcgcccagctggaggaggagctggaggaggagcagggcaacatggaggccatgagcgaccgggtccgcaaagccacacagcaggtgagggccgcctggacaccacagtcacgctgcctactgtctctcctgcagcaggatcctgcaccagtcaacacacgcgtggcggcttcctgtgtgcaggccctggattgagggacaagagggtggtggggcctgagagtagagatccagggcccttacaccagtgcccaggctgctgtcttcagaatactcctctccacgctgcagtgtctcattttccagccacggcgtggctggctccccgtacctcacggccatccctggagtccgggccttgggatgctctttcattgcgttttcccctagctgaagctctgaccttatccagtgagcccttggtgatgtcactgagcactagttccatggtgggcactagggaccatccagtaacctgcagccccttgtggtgtagggtgaacaggcatcattctccaggcgactccaggacagagaaagcaagggacaagtcactcgctcagcctgggtggcactgacacttgtggaagcacctcttttttttggagacagggtctctctgtggcccaggctggagtgcagtggcgcaatcttggctcactgcaacctctgcctcccaagttcaagggattctcctgcttcaacctcccaagtagctgggactacaggcacgtgccaccactgcccggctaatttttgtatttttaatagagacggggtttcaccatgttggccaggcaggtctcgaactcctgagctcaagtgatttacctgcctctgcttccaaaagtgctgggattacaggcgtgcgccaccacgcccggcctggaagaagctcttgagtggagttttacaggatgaaggagaggacagggtgcccgggatcaagggactcgtgcagaggccaaacaaggcaggaagaggcatggtctcagtgcgctctcttgggcttccctgagtccgcctcatggccttcactctcctccccaggccgagcagctcagcaacgagctggccacagagcgcagcacggcccagaagaatgagagtgcccggcagcagctcgagcggcagaacaaggagctccggagcaagctccacgagatggagggggccgtcaagtccaagttcaagtccaccatcgcggcgctggaggccaagattgcacagctggaggagcaggtcgagcaggaggccaggtatgcgggtgtggagttccgaacccagtttgcaggggggtgatggacagcaggagtcatagtgaagtcagggaacctcttccagcatcagttctggcttgtaagaagcaagctctgtgatgcctacagtgcaggtatgttgtgagaactgaacgtaaacacagcaaagtgccctgctggttcctggcctagggcaagcacctaaagtgtgagctgctcttagcatctccatggtcctcctgacattaacctgccttcccagcagtacatatgacttttcccagcctctgcagggatagcatgctgacagatcaaaaatccaaccaggctggacgtggtggctcacgcctgtaatcccagcaatttgggaggctgaggcaggtggatcacttgaggtcaggagtttgagaccggcctggccaacatggtgaaaccctgtctgtaccaaaaattagccgagtgtggtggcacatgcctattatctcagctactcaggagactgaggcaggagaatcactccaacgtgacacgtggaggttgcagtgagccgagattgtgccactgcactgcagcctgggtgacacagtgggacccttccacacacatacacacacacaaaaaaaaccccaaaaaacaaaagtccaaccggcagcccatttggtacacacactggaagccttcttaattatgggtcgaatgaggcatatgatcacagcacatttcttaccattggattctaaggattctcacccattctcttctagtagctttttcagtaattcgcacgccctgcaatgcacccatttaaagtgtataattcaagggctattcatatattcacaaacatgtaaaaacgatcaccacagtcattttgagaacattttcatcggctcaaacagaaaccccaggccatatgtggtatttcatgcccataatcccggcactttgggaggctgaggtaggtgggagcagcacttgagtccaggagttcgagaccagtctgggcagcatagcaagacttttttatttttatttttttgagacatagtctcactctgtttcccaggctggtgtgcagtggtgcgatctcagctcactgcaacctccgcctcaccctcccaagtagctgggactacaggtgcacaccactgtacccagcttgtaattgtattttttagtagggatggggtttcaccatgttggccaggctggtctcgaactcctgaccacaggtgatctgcccacctcggcctcccagagtactgggattacaggcatgagccaccacgcctggccagagactccgtttctatgaaaaacttttaaaagtctgagcatgctggtgtacgcctgtagtcccagctacttgggaggctgaggtgggaggattgcttgagccaggagttcaaggctgcagtgaactatgaactagggtgaagagcaggcattggagcaccactgcactccaacctgggtcacacagcaagaccttgcctcctccccgcaaaaaaaatagaaaccccatgccctgtaaccactcccttcagtccctggcaaccataatctactttctgtctctatgaatttatctattctggacacttgatatcaacggaatcacacactatgttgtctgctatgtgtcttctttcacttggcaagaattccaggctcatccatgctgtggcatgcattgatactttattccttttcatggctgaatactattccaccatctgactgattcttgagaggagtccagatacggggctcaggaaagcactcaagatgccacctccaggtgacacaccagctacaaggggtgccaccctccgctgaaaccacctgttttccttgctgtttgcagagagaaacaggcggccaccaagtcgctgaagcagaaagacaagaagctgaaggaaatcttgctgcaggtggaggacgagcgcaagatggccgagcagtacaaggagcaggtagcccctgccacccagcctccctcgagcccccagcccccagccggcctcccctaaccacccctccaactctccgcgacaggcagagaaaggcaatgccagggtcaagcagctcaagaggcagctggaggaggcagaggaggagtcccagcgcatcaacgccaaccgcaggaagctgcagcgggagctggatgaggccacggagagcaacgaggccatgggccgcgaggtgaacgcactcaagagcaagctcaggtgaggagcccgtggcccgggaggaccccgtctctcaggccagagaaaagcactgggggctcgggctcctttcggcctgcaaatgccccttgtgcccacagccgccactcccttctgtggtttattcctgcttctccttaatcactaagcttagtgtgggccaggcactgagatcagacccgggccctgccttgcctggtagcagctaaccttctagatcctttaacgatcgaccgtctcccatccggtcctccggctgaggaggaggaagaggctatccccactgtctcctccagcccctccttcattgcatcactgagtcttcacgacatccattgaagctgcaacaccaccccccgccacttcacctccttcctgacatgctctgctcctcctttctccccctcagcactgctgccatctgggctgcattattctcgggtatgggggctgtccgacattccccatcagaaggaaaaagatccctgaaaagtagcaggtgcttacatttctggcctctacccaccggctgcagtagtcccccaccaccctgcaatgtgacaaccaaaaatgtctctagatgttgccagaagtcctctagagatgggagggtacgactgccaccccgctgagaattcctgctgtcactggagtgggggctgttttctctcccatgcctctggtaccttgggggtcccccctgctcccaagggctgcttccaccaccctgtccatccatcccgattggctcccaggaggttttagctccgggcttcctgtctcccacaccactcctcacagttctccatgatttcaacatccaggtgggcgacgcagcctctcggttccttgaccctctgggtgatcctgctgcttctaccgggccaaccagtactcctaggagccctcacaatttgaccctcaggcatcccattgtctgcctggtgccacctttctttggctctgtccccaacggggtcttcactccattaatgccatcagcctctgacccagctccaaaccagctgtctagtaacccccgtcgcgcatcctcaacatccggttccccctcttgcattgctgcaatcatttggtgaaagcacaacccaaatgaaactcaagcttggctgggcacgggactcacacctataatcccagcactttgggaggccaaggcaggtgaatcgctttgagctcaggagttcaagagcagcaagaccccatctctacaacaaacaaacaaaaatcagccaggtgggatggcgcaaacctaaaatcccagctactcaggaggctgaggtgggacgatcagtggagccccagaggtcaaggctgcagtgagccatgatctagccaatgcacttaccctggatggacagagtgagaccctgtctcaaaaaacccaaaacccactctccaccttttcccacagagcaggccttgctcaggggtcctcccacacccctccctcatcttctcactctctgctgcttttcactttttctttgaacttatgatcgctcctccccattctctctcagctggggaccttacttcctacttaactcaaaagcagaaatgatcatgaaacgtgcacaagctcccactgcctcatcatcctacctccgtgcacctctgtacacttctattttttttccatttctatgctgaaccctctggcaccaaccgaggccaacacctccattggacccgaccctcttgttcactcaagcacatagctccaaaaatccttattttgcaaggttttctctttcatttgctccatcagcaaatggaataacctcttagccccatgtctaccttgctacccttactacaaaactggatgtgaatgccgaaaccctgtctctaccaaaaaatataaaaattagccaggtgtggtggtgcatgcctatagttccagctactcaggaggctgaggcacaagaatggcttaaaaccgggagagagaggttgcagtccagcctgggtgacagagtgagactcggtctcaaaaaaaaaaaaactgtatgtgaagagttgctggttcccctcgcccccacccatcactctcccagaagcctcccatgggtgacactaatggccagaggtcccctgacagggcagcagcacgtgacgcagtccatcatgcctctggcctaattcacttgcttccctggacttccccgacaccatccacacctgcttgtcccccgacctgtggggttgtccctcttcctctcctctgctgatccctcacctcgaaacctgcttgccactagaccgccccagggtatcaacttagttctcttttgggcagagtcttgctctgttgcccaggctggagtgcagtagcactatctcagctcactgcaacctctgcctcccagttcaagctatttttggcctatttttatatttttagtagagatggggttgcaccatgttgcccaggctggtcttgaactcctgatcttgtgatccacccgcctcagcctccccacgtgctgggattacaggcatggaccactgcacggccttagttgttttcatctctccccagcgctaggtgagaggtctcaactaatcttggcgctttagaattccatgtatatctaatgactcctcagttcatctctgagaagccctagcttcttcctagaacctcagaccaccctcccgttcccacatggatgtctaataggcagctcacaccaaacatgctgcaccccaagtcctgactgaaactcttcacccccaaactggctcctctctccagctcagcagctaaaatgatgaagttgccaacaattcacatcacaaacctcgtggtccttcttaacgttttggtctcctttataccccacatcccatctatgggagaatctggtcaactttccctaaagaatcctgcccaggctgggtgcagtggctcaccccttaatcccagcactttgggaggccaacgcaggctgatcacctgaggtcaggagttcaaggccagcctgaccaacatggtgaaaccccgtctctactaaaaacacaaaaattagccgggtatggtggggcgtgcctgtaatcccagctactagggaggctgaggcaggagaatcgcttgaacctgggagacacaggttacagtgagctgagatcgcaccactgcacttcagcctgggtgacagaccaaaactcggtctcaaaaaaaaaatctccagtgtctaggacagcaccaggcagagtgaacctttatccctcgggtcctagatattttccccgcttcattctcataccaccacagccatgtgctgagcctcttactacctttaataccaatgacttgatcttttaacagttttaatcatacatgaatataacggcaaataaacatacctcctctatatttttaaaccagcatcacctctatcaactggttacgatgaaagtaatatgataaaaatagtatcaagttcaatatctagctattgtggccacaacttgatcaccaagacctgaagcctacttctccactaaaaagggagtgacaacagccattagcaccaaatagactctctctgacatcataattagacttgtttaaaaagagttggaaaggaaatgactttctcagggcccagttcagttagcggatggcatgcccggaagccatctgaaatcacctctagagtttggggaccactgcgtgagacagggaaaagtccaaacccctctgagaaggggaagagagcagctggcgcagggcaccaagccttcagggaaaagccccactcgctgcatggtgagcgcttgttggtcccccatggataggagagaaaccaggcctaggctcccaaagtacagcaggggcctggaagcatctcccagggttgaggggtcagtggaggagagctgttctcactgtgaagactcctggggcaaagcgcggtggctcacgcctgtaatcccagcactttgggaggctgaggtgggctgatcacctgaggtcaggagttcgagaccagcctggccaacatggtgaaacttcatctctactaaaaacacaaaaatcagctaggcgtggtggcagatgcctgtaatcccagctactcgtgaggctgagacaggacactcctttgcaacccaggaggaggagcctgcagtgagccaagatcaagcctctatactccagccttcagagcaagactctgtctccaaaaaaaaaacaaaaaacaaaaaccctcagatgtgctctgctggcaaccagtccccctgcctctcctgagtggctgggctgagcgatggggatacagccactctgactccctaccccactgctgtctctgcttccctttctcaggcccagtgatttcttttctttttattatttatttttagacggagtctagctctgttgccaggctggagtgcagtggcgcgatctcggctcactgcaacctttgcctcccaggttcaagcgattctcctgcctcagcctcccaagtagctgagattacaggtgcgtgccaccacacctggctaatttttgtatttttagtagtggcaaggtttcaccatactggctgggatggtctcgatctcctgacctcgtgatccacctgcctcggtctcccaaagtgctggggttacaggcgtgagccaccatgcccggccggcccagtgattctttagcacacactggacacctcctgtgggttctgccccagacacttgagccttcttgggcagccaagggcaaagtggaacaaaaagaccatttttgccagttccgacacgaatacacacataatgcaggtggaaggtctgtcctgccttctgcatcttttgggtgcacaaaaacataaaatcaggcactagagccctgagggaggttggtaagcatgcctggctcctcagccaagaaggaactgtagtgcgagtttcaccaagttctatcagccagacgcatctcgacacaagccctctctaaagccagacccacttacctaccactggctacactgccagttacctccggcaagagctgtacaaggcctccacctctcctctcttgctagaggcccgaaagctaatgaagagcaagtaatcataaaccaagggacaggcggctgcaggttccttgcctgggacttcttggcttctgttccaacactgatttctcaaactagcttgctcaaatgcttttacttccctgaaccagtatgcaatcatgggatttataggaggttcttaaaagtagctctaaaggacagacattttcctttccatttaaaaaactgagccgggtgcagtggctcacacctgtaatcccagctctttgggaggccgaggtgggtggatcacttgaggtcaggagttcgagaccagcatggccaacatggtgaaactccgtctctactaaaaatatgaaaattagccagccacggtggtgcatgcctgtaatcccagctactcgggaggctgaggcaggagaatcgcttgaacccgggaggtggaggttgcagtgagcagagatagatcatgccagtgcactccatcctgggtgacagagtatcaaaaaactgcttatcctttcatctaccagcctcaccaaatgctcttggcgtcaggtgattcactgcaacgttgacttaagggtgcttttaatgccaggtgcggtggttcatgcctgtaatcccaaatcccagcaccttgggaggccaaggcaggaagatcattgacatcaggagttggagacaagcctgaccaacatagtgcaaccccatctgtactaaaaatacaaaaattagccaagcacgtggggcctgcctgtaatcccagctactcgggaggctgagacaaggggatcacttgaatccaggacgtagaggttgcagtgagccaagatcgcacccctgcactccagcctgggtgacagagactatctcaaaataaaaaagagtgcctttaattattaaatcgaagcaaatgtctttaacaattaagaatatacttaaccgggctccttcttgtttgctgatggtaacctccggggattctctctctgtttcagagggccccccccacaggaaacttcgcagtgatgcaccaggtatcatgccttcagcttcgcagctgtgtgttgtctcagtatccatttcttttctgcccaatgcgcccctctgcccaccccaatttttaaacccttgcacatttccacgagattcttgcaaaatctggaggcttggatatctttgtgcaaagctttcattgaaaccaagatcaggatgacaaatagacctcatctcttgacccactgtccttcctgcctctgggcagcacatgtgacatgacacccaacagtgtgcgcccttatcactgcatcttgacgagatggcagaggctgtgtgtgtagcttggatttttcttcctttcataccaaaagccactcttacgtggttagggcactcagcagtgctgtcctcccttgtccagtgaagacactgcactgaatgaatatgacagttccactatctgggcacattcctggagaacgtacttggcttctagttggctggtctgggtcacaagtcagagatcacaaagttcacggtaactgcggcgcggcaaccagtcctcccatgattcagctttcacaggcttgtctgcgaaggaaatgagctcactgcgatgtctgacaaatgccgggggctgcacgtggcttgagtgatgtctagctacaaactgcattttcagcacacggggtggaagctgaccaccgcaaagccaagcacagtcctggcagagccttttctggaggcttcacgggcatgtacatgttcagggactggggagtggatacccaagactcaaggatgcacacagggcccttcccaagaaagcatgaagaggtctctgctgctctgggattttgcttttttttttttttttttttgagacggagtctcgctctggagtgcaatggcgcaatcttggctcaccgcaacctttgcctcctgggttcaagcgattctcctacctcagccttctgagtagctgggattacaggctcccgccacctcgcccagctaatttttgtatttttattagagacaggatatcaccatgttggccaggctggtctcaaactcctgacttcaggtgatccgcgcgccttggcctccccaaatgctgggattacaagcatgaccaacttttcacaggtgaagttaggccatgtggatctgacttcacctcatggagaggccaaaccaaccctcatttgtgtccatcttcatttttggagaatctcagctttgctgtcactaccaaaatacttaaagcgcagggtgaggtcttgttaagagccagttttgtgggggagcagatgagtttctaggacacttcaagcagctctcctaccagctgattgggatcataggataagccaaattccagggtgggctgaagtgcagaacccactggtcagtgggaaactgagtccttgcaaactagcaggtgcttacactcaagatgattcccgaggccttggataagctgagtccacgaatagaatccaaatgctaggccaggcacagtgggtcatgcctataatcccagcactttgggaggccgaggcgggcagataacttgaggtcaggaccagcctggccaacatggtaaaaccccgtctctcctaaaaatacaaaaattagccaggagtggtggcatgtctgtagtcccagttacttggaaggctgaggcaggagaatcgcttgaacctgggaggcagaggctgcagtgagccaagatcacgccactgcactccagcctgggcaacacagcgagactctatttcaaaaaaaaattccagattctccaggatcagaccctttaagaaaacctttaggggggtcccttagttcctgtaacaggtatagttggtgtcaaccttggtctaggatttgaaaccagttccaagaaaagcacttcagccaaaacagagtatcttgcaggctgacagccaagcaaggagcttcaacggcccagggcacaatgtatttcttaggtcaagggagcaaatttatccattaagcttttccagttagcaaatagactcttccaagagccaaaaagagagtgcctagagcactgatgtggaggttagggactacttcccagctcatcagatttttttttgtttttttttttggagacagtcttgctgtttcccaggctggagtgcagtggcacaacgttggctcactgcagccttcacctcctgggttcaagcaattctcctgcctcagcctcctgagtgactgggattccaggcgcctgccaccacgcacggctaatttagtatatttagtagagacggggtttcaccatattggccaggatggcctcgaacaactgacctcacgagtgatctgcccacctcggcctccccaagtgctgggattacaggcatgagtcgcagcaactggccaacccatcagggtttgaacctggagttaaaactgtgacgaagagagctgtgtggggagcgtacagggaacagtcaaactgctgctcctctgcgctgaatttgagcatccttctgagtcaagcgcttggaaaacagtgctaaaaaagaaaaagacttaagggtcacatctagagagagaaggatggagagttctctagtagggctgcaagtccagaagcttctctgtgaagctgggctaggagtgtttactttgaagtggctgcagctttaagtatttattcctgatcgctgcactgcgggaagtcccatcctttatagccaggtgggctttcccagccggggtctctcccatcctctgtcaacaaaagggtcatttgcgaattcctcttctcagtgatcatgaatctctgggccttgatttttttttttttttttttttgagacggagtctcaccctgtcgcctaggctggagtgcagtggccacatctcggctcactgcaagctccgcctcctgggttcatgtcattctcctgcctcagcctccctcccgagtagctgggactacaggcacccgccagcacgcccggctaattttttgtatttttagtagagacacggtttcaccatgttagccaggatggtctcgatctcctgacctcatgatccgcccgcctcagcctcccaaagtgctgagattacaggtgtgagccaccatgcccagccgagttgttccttttgactaaagaattggtcactgagttgtgttcatccttatggcttcttatccaacccttgcgtggggagcaaaagtctgctctcttctttgatgtcctaaaataagacctgtcttccgattcaggtcaaacagggccagatggccagagcccaacataattatttgttgcggttgctgaaaagagttaagtgtttcttctgaacggtgaaggctggcagcaggcagatctgatttttccttcttctgcccactctcttcctcctacccaaagtctcccctcacgtgaccagcccttcctgtgaagtcgaggtgataaactcaagagagaaccagcgcagagaggagatggcagcattaaggagagacaggggtgtcctactggctggagctaaaatccacctcagaggccaggtgcactggcacacacctgtaatcccaacactttgagaggctaagacaggtggatcgtttgaggccaggagttcaagaccagcctgggtcacatggcaaaatcccatctctgctaaaaatacaaaaattagccaggcgtggcagtgtgcacgtgcatgtagtcccagctactcaatactgaggctcaaggactgctggaactcaggaggcagaggttgcagtgagccaagatcatgccactgcactccagcctgggtgagagagactcttaaatttcttttttaaatccaccttgaaggccaggtgtggtggcccacgcctgtaatgccagcgctttgggaggccaaggtaggagaactgcttgagctcaggagttccagaccagcctgggcaacaatatcaagacctcatctcaatttaataaaataatccaccttggattaacacgtataatttccttttctaatattcactgggcacctgttttacgccatgtgcggtatgttccacgatcagcaaaacagatgcagcagtccctgcagtggggaaaactcagtccatgaacattcacaccagcagggggtgctgtctcgccttttaaccagggagcccctctgtgtccttctcaaggctgcccttgtccatttcaccttcttccaattcaaatcttgaaaactcacctctaaggcgaatgggggtgaggagatacagaagaaaaacagtatgttctctcttcaactctgccccatgggctatgaataaagtcagaagacaaaatcccctgcttggtttttggcgtttttttcctattctaaatcaaagaccacagcagaccagaatcctgtggcttctcaaatgaccaagcctgacatattgaaaagcagatcgtcttgctttgaaaaaccttctccacccacccccgcaaccaatttcagctgattaaattcaatcactcatgccttaagactggcaatgatttgttgacttcaacttgaatatctgcatcttatttgtgccgtgtgtgttttctgccataaaaaaaatttatattgcaataggactatagctacaagtttaaaatagatttataaaaaatctatcccaaccatgaagatttctttgctaaataatgtgttttcttacaacccacaggcgaggaaacgagacctctttcgttccttctagaaggtctggaggacgtagagttattgaaaatgcagatggttctgaggaggaaacggacactcgagacgcagacttcaatggaaccaaggccagtgaataagcaactttctacagttttgcaccacggcaagaaaaccaaaaaccaaaacaaacaaacaaaaaaaacccaacaacaacccagaacaaagcaaaacccagcagactgtacttagcattgtctaaatccattctcaaattccaaatatcacagacacccctcacacaaggaatataaaaaccaccaccctccagcctgggcaacgtagtaaaacctcatctatacaagaatttaaaaataagctgggcgtggtggtacacacctgtggtcccagctactagggaggctgagccaggaagaacgctccagcccaggacttcgaggctgcaatgagctataattgcatcattgcactccagcctgggcaacagagaccctgtctcaaccaccaccaccaccaccacccctactacccctgtattcaaggtaaaaattgaagtttgtatgatgtaagagatgagaaaaacccaacaggaaacacagacacatcctccagttctatcaatggattgtgcagacactgagtttttagaaaaacatatccacggtaaccggtccctggcaattctgtttacatgaaatggggagaaagtcaccgaaatgggtgccgccggcccccactcccaattcattccctaacctgcaaacctttccaacttctcacgtcaggcctttgagaattctttccccctctcctggtttccacacctcagacacgcacagttcaccaagtgccttctgtagtcacatgaattgaaaaggagacgctgctcccacggaggggagcaggaatgctgcactgtttacaccctgactgtgcttaaaaacactttcactaataaatggttataaatcacaatgtcgttggcttttctgttgagctgttttctatagaggaaaaggagttggggaaggctgggttttgcttcatcgtcccaaagattctctgaagtcagggttaacgtcatgaatgcagaaactgaggcctagagaggtgaaatcaattgcctacaaccccacagccagccagagagcagagcagagatgcaaagtgagactgtctaagggggttactgggccgctcagcagggagggcaggggagagaaataaggtgatgtgtggtctaagggccactgccccctgccctcgaacatgactgggaagaacatcttgactcatcaaaaccagtatcttaagaaaaatacaggatttccttgattttttgagttaaaacacaaggtcttgtccaatgagtcagcaaacactttccacaaaacgtcagatggtggctgggtacagtggctcacacctggaatcccagcactttgggaggctgagatgggaaaatcacttgaggccaggagttggaggccagcctagccgagagagacccccgtctctataaaaaaaaggtgttttttttttgttgttgttagtaagccaggcaggatagtgcacacctgtactcccaacctcttggaaggctaaggcaggaggatcatgtgagccaggagttccaggctgcagtgagctatgatcacgccactgcactgcagcctaggtaacagtaacaccttgtctctcacaccaccaccaccacccacccagccagatagtattttagcctttacaggctacatatggtcttgccgaatattcatcttctttaaaacaacccttaaaaacataataaatcattcttagagtaagggccataaaaacaagctgtaggccctgtccttctttcagcttgagtgttttagacagacatgcctgcaaaggctctgttcaacacaaacgatgccgtataccaccaactccatgggatcagacagatttgggagacaggaaacatggaaacaaaggactccatcttgtgaccagatgctaatatgccttgaatgacgcacaaacacatcccggatacatttctaaaaacctggcttgaatagaaattttcaaaaagattttttcatattttttaacttggttaaaaaaagtttttcaccactctgtgggaaaacattaaagtataaacatacaaagcctctttgaccagaagcccaacaagttcaacattcgtttctcttgattttattgatcttttaaaaaaataaaaggacatcttctgtggatacaggttaggatgtttctagggtaagaaacccaccatcgcagcgtaattctctgcggaatttcagtagcacttggaaagttctgttttcaacctgaaatttttgctgttcttccagaaaataacttagtaacaaaatgaaggccgtgaagctgcaggcacactccagaaattagtgtgttcttttaactcgtgtcccaaagagacagcagttcctaacatgcagtgatgagtggacacaccatggtgcgttggaaatcccacgttcacgtctttgacaaggaagcctcctacaatgatcttgtgctttaattttacttgatggtcaccctggttacttcattatgcctttgaatgaagtcctgttcttagtggctgcattaccaaggccatcttgccccaaagacccctcagggtcctgaggcagaattccccccaccccaccaggggactcaggaaaatgaatgatcgcagtttgccaaaagaggtcagatttcccactgacgctggttggtctggaaaattactctgaaaactcgaacgcacctctaggaatctcaatgagaagctaagaagcaggctacagtctcagaggtttatgacacctttttttttttttttggagacggagtctcactctgttgcccaggctggagtacagtagcgcgatcttggctcactgcaccctccacctcccgggtccaagcaactctcctgcctcaacatctggagtagctggaattataggcacgcaccactgcacccagctaattttttgtatttttagtagagatggggtttcaccatgttggccaggctggtcttgaactcctgacctcaggtaatccacccgcctcggccttccaaagtcttaggattaccggcctgagccaccgcgcccagcctattccagtttttaaaaaggcatgtgactgttaagttctctgttcttagacatgatttcagtacaccacaaagcactgggagattttgttctggaagacgattccacctggttgggagttggggggaagagcctctgagagaagctccatcccacatttacggagacttgggacattaaaaacacctgtcaagaccaatcaggggccaggcacggtggctcaggcctgtaattccagcactctgggaggctgaggcgggaggatcacttgaggccgggagttcaagaccagcatggccaacatggtgaaaccccgtttctcactaaaaatacaaaattagtgggtgtagtggcacactcctgtagtcccagctacttgggaagctgagataagagaatcgcttgaacctaggaggcggaggctgcggtgagccgaaattgcaccactacactccagcctggacaagacagggcaagagcatgactctgtctcaaaaaagaaaaaaaaaaaaaagaccaatcaggacctccgcttgggttagtgcaacacaatggggcatgggaacgatggctcatgcttgaaatcccagcattctgggaggccgagatgggaggatcacttgaggccaggagttcaagaccacactgggcaacatggcaaaaccccgtctctattaaaaatacaaaaaattcagccaggtgtggtggtgggtgcctgtaatcccagctacctggaagactcaggaacaagaaccgtttgaacccaggaggcggaggttgcagtgagctgagatcacgccaccacactccagcctgggtgacagagcaagactctatctcaaaaacaacacggtagcctcatcaccgacaacttagagcccttcccagagagccccttttgtccctctttgcaatgcacacggtggcaggtaaggatgaaaagacatttcccagggacaaaccccagagcacaggtgatggcctcggtcattggcttgggccgcaaagctaactaactatggtgactgctcttatttctcaaactaacttaaaacaaaaacctagtgtaaaaagacgacaaaaggtaacgacttccgcaccaacaccaagaccttcagcttccgtggttttcctaaagcaacatcttgactaccccctgggctgacggcagcggcgatgaagacatgtgtgaaggcggcttcccaaattccaggcgcttccccaaccttcagacagagcaaaccaaattaagctgacataacagctgtgacaaactggctagcaccggggcccagagagttataagggtgaacatcaagagtcaggagcagggtctcacagggtctcaattttctctcctgtgaaatgaagaagaggacactggctacctggctctcagattccaaggtcacacaaaacgcccagtctcagacccactagaaaaatccatctcttacctattgtttgtttgttttacagcctacgcaacatagtgagaccctgtctctatgaaaaatgcaaacaaaaattagctgggtgtggtggcctgcatgtgtagtcccagctacttggtaggctgaggtggaaggatcgctggagcccaggaggcggaggttgcagtgagccgagatcacaccaccgcagtctagcctgggtgacagagtgagaccctgtctccaaaaaaaaaaaaaggccaggcatgattgctaacgcttgtaacccccagcacttgggaggtcaaggtgggaagatcgcctggaaaattaatctgaaaactcacctctagaaatctcaatgagaagcagactacagtctcagaggtgtattctcaaactcaaagccaggaggtttgagaccagtctgggcaacatagcaagactgtttctataaaatataaaaaaaattagccaggggtggtggtgtgcacctgtagccccagctacttgggaggctgaggcaggaagatggcttgagcccaggaggacgaggctgcagtgagctatggtcgcaccactgcactccagcctgggtgacacagcaaaaccctgtctcgtagaaagaaaacaaacaaaaattaatttttttttttttcttgagaaagagtctcactctgttgcccagagtggagttcagtggtgcaatcttggctcactgcaacctccacttcctgggttcaagtgattcttgtgcctcagccacccaagcagctgggactacaggcatccgcgaccatgcccggctaattttcgtatttttagtatagatagggtttcaccatgttgcccagtttggtcttgtgaactcctggcctcaagtgatccacccacttctgcctcccaaagtgctgggattacaggtgtgagccacttcactgcacctggcctaaaaatccacgtgtaaaggtctcaaagttatgtgcatgccatggaaaatattcttaatttcctgtcacgtgtctgctacaaacccatcaaattcctacggcttggggcccagagagatggtagtcacacaccttgcagaattcctgaatctgaaagctgccccttttttttctgagacaaggtctcgcttcatcacccaggctggagtgcagtggctgggaacacggctcactgcggcctcaacctccagagctcaattgatccgctgccctcagcctcccaaagtgctgggattacaagtgtgagccactgagcctggccctgattttctttaggcaagaaaattaatgacactgttagagatcagatctgcactgtcccatcgggtggctggtttcaggaacatagtctgggctagaagttagtgccagtttctcaaaggttctacagatttaaaaagaaaaaaaagggctggttgcagtggctcacgcctgtaatcccagcactttgagagcccgaggtgggtggatcacaatgtcacgagatcaagaccatcctaacacagtgaaaccccgtctcgactaaaaatacaaaaaattagctgggcatggtggcacacgcctgtaatcccagctactcaggaggctgaggcaggagaattgcttggacttgggaggcagaggttgcagtgagctgagatcatgccactacactccagcctaggcgacagagcaagacgtctcaaaaaaaaaacaaaacaaaacaaaaaaaaaaacttcaggggaagcagagccatgactgatgctcaattccccaaataagggctttatttttatttaactaattaattaactttttgatatggagtcttgctctgtcacccaggctgctgtgcagaggcacaattttggctcactgcaatctctgcctccagggttcaagtgattctccttcctcagcctcctgagtagctgggactataggcacatgctaccatgcctggctcatttttctattttttttggtggagatggggttttaccaatgttgcccagactggttttgaactcctgacctcaagtgatccacctgccttggcctcccagactgctgggattacaggcgagcgtcaccacacctggcccaaataagggcttttatacaggacattctcacagtgtaaccgtgagtagcagctgtagaatcaaatgataaaaatgaccttcttggccaggcatggtagcccacacctgtcgtcgcagcactttgggaggatgaagggtgaggatcacttgaagctcagagtttgagaccaaactcggcaacatggcaaaacctgtctctagaaaaaatacaaaaaattagccgagcacggtgacacgcacctgtactcccagctactcgggggactgaggtgggaggatcgtttgagctgggaggcagagggtgagccatgatcctgccatcgtattctagcctaggtgacagagtgagaccctgtctcacaaaacaagaccctctctctagccctttgttcaagccacaagacaccacctaatgctgcctgcagggagcagaggagaggataaggtttgctgaaataatcctataatttaaaaagacacatggctgtgggctgggggtgagtgtctcttgcctggggcaggcgggttctccccgccagcgagaggtttattagaaggtactgaccccttatcacccaaaggcacgctggtgctgcttggccgtctctccccgccatctctgttcttgctgctccgcccagaggctgggccacctgttcggtttggggactgatcgtacacgaggttccggcaggaagcgagtttggactccagtgcctggacagaaatacacttttatctctcaagttataggcaaggactattctgtcttaccagagcctgtacagaagaacgaaccccagacagtggttctcaaactgttgtgcactggaattccaaggtgggaccccaagaggaatccaacgtatatgccagtctcagaaccaagcaccttaagtatttgggagctggctgggcacaatggctcacacctataatcccagcactctgggaggccaaggcaggaggatggcttgacatcaggagtttgagaccagcctgggccacaaagtaagatcccatctcagtttttttttttgttttgttttttacttttttagacgctgtgtcacccaggctggagtgcactggtgagatcacagctcactgcagcctcaacctcccaggctcaaccaatccctcccacctcagcctcctgagcagctggaattataggcatccgcaatcatgcccagttaataaaaaaaatttttaatgcaaaaaattttttttaattacgaaaaattttttaaaatgtttgggagctgcctggaaaaagatcacggctcactgcagcctcaaccaatccttccacctcagcctcctgaatagctaggactatgcacaatcatgcttggcttaaaaaaaaaaaaaaaattcttttttaattacaaaaaattttttaaaatgggagctttctggaaaaatcactaacctaccaattatccaactccgcttgtaggaagtaggaaatccacttctggaatccttcaccctttggtttaccttgttaaacctctgcagaatggcaagaagtttggtaaggacttggtctggctacaacagaccctgaggaaaccaaaaggacactgacagcaccccaggcttctctatactccaactaggctaaatactgaaatgcagacctgcttctagaatagcaaaccagacagccaaaaaccagaagtaaaaacaaaagaaatgagttgcaagcttctattaagttgtagctacaaatacactgtgtacagtgacaacttggtaggagttaaattatgtggccttctaggcatcatttttaaaaataaactacaaagaatacctatgtttttacttaagcacaaaaggatccctccctgtaattaacataaaagctgaaaggccaaattctttgccctaggctttcaagattttttttttttttttttttgagaccaagtctcactttgtcacccagcggtgcgatctcagctcactgcaacctccgcctcccggattcaaacaattttcctgcataagcctctcaagtagctgggatcgcaggtgcccaccaccattcctggctaatttttgtatttttagtagagatggggtttcaccatgttggccaggctggtcttgaattcctgacttcaggtgatccacccatctcggtctcccaaagtgtcaaaattcacttaaaccccaagaaacaaaccaaaaaaaaaaaaaaaaaaaaaaaaggtggcagtttttttctcttctgagacaacgtcgtgctgtcacccaggatggagtgcagtgttggaatctcagctcactcagcctcaacctcccaggctgaagcaatcctcccacctctcagcctcctgagtagctgggaccaccagtgtacaccatcaggcctggctaatttttgcattcttgtagaggccaagtcggggcagggggtttcaccatgttgcccgggctggtgtcagactcctgagctcaagtaatctcccaccttggcctcccaaagcactgggattacaggtatgagcacccggccaaaagagaaggcagtttccaagtgctccttaatttttcgagttaaggaaaaaacacacatatcaccctaatttcccaaatttcctagaggaaaaacggtaaaaggaaagagacatacatagggttcagagcagggcttcgagtcagagctctgagtgtctggcagtaactcccacaggaagctctaatgattcccagggatgctaaaggagcagccacacctaaaactcaccacactgctatgaaaggggctggacgcattggctcatgcctgtaatcccagaactttgggaggccaacctgggaggatcacttgaggccaggagtttaagaccagcctgggcaacacagcgatacccacattactacaaaaaaatgaaagtatcagccaggcatagtggcgcacacctgtggtccaagctcctcgggaagctaaggtgagaggatcgcttgaacccaggattttgaggctgcagtgagttgtgatcataccactacactccagcctgagcaacagagcaagaccctgtctctaaaaaaaaagaaaaaaagaagagagggaaggaactagatcaacccccttcacacatcctgaaagacaggcaggaaggcaccaaacgccaggaaagtgtggtcttaccccgactttccgcagtaggtctcccacaatgttgagggctgatatccgggccgcaggtgtgaggggggtccccccggtggagtcgtccaggcctgggtgtgcaaagggaagagcatgtaactcaccaacctatagtcatgtctgtgcgttaacatcgctagatccaaaaccacgggacaggagggacactgacgcctttcctcggatcccaaaagctaccctatttctttccgtagttaaccgcatcacacacccaaggcccgtatgacaaccaatttttcaagtccttgtgatgactgcaacaaatacttatttttacatgttagtcttgctctgtcacccggactggagtgcggtgatgtgatctcagctcactgcaacctccgcctcccaggttcaagcgattctcctgccttggcctcttgagtagctgggattatagccatgtgccaccacacccggctaatttttgtatttttagtagagacagagttccatcacgttgtccaggctggtctcgaactcttgacctcaaatgatctgcccgccttggcctccaaaagtgctgggattacgggcgtgagccaccatgcctggcctttaacaaattttttttttaatagagacagggtctcactatgttgcccaggctgatcatgaactcctagtttcaagcgatcctcccaccttggccgcccaaagggctggtatttacaggcatgagccaccgtgcccagccacattagtctttttaaacaaacccaaaacaaatccttttgaaattgtagaaaatccatatagttaattaacataatggcatctgtgatagatacaagaactatagacaggatgatccagctttacaagggtcccgctctgcagagcctctcttctccaagtggggtccatgcaccagcagcacatgagaactgttagaaatgcagaatctctcggccaggcacagtagctcacacctgtaatcccagtgctttcagaggccgaggcagttcgatcagttgaggtcaggagttcaagaccagcctggccaacatggcaaaatcttgtttctactaaaaatacaaaattagctgggcatggtaacaggtgcctgcctgtaatcccagctactcgggaggctgaggcatgagaatcgcttgaatccaggaggcagaggctgcagtgagccaagatcaatgccgctgcactccagcctggccgacagagcaagactttgtctcaaaaaaaaaaaaaaagagagaaagaaatttcaggccccacccaagacccacttgatctgaggtacattctaccaagatccccaggtaagctacatgcatattgaagtgtggaaacatagccaggcatggagttgcatgcctctagtcccagctactcaggaggctgaggcaggaggatcactggagcccaggagttggaggctgcagtgagctatgattgcaccactgcactccagcctgggccacagaccaagactgtgtctctaaaaacaacaatgaaataaagtatgcaaaatggctctagactggggctaggcacagtgactcatacatgtaataccaccactttcaggggctgaggcaggcagatcacctgaggtcagtagtttgagaccagcccggccaacatggtgaaaccccatctctactaaaaatacaagattagccaggcatggtggtgggcacctgtaattcaagcttactcaggaggctgaggcaggagaatcacttgaacctgggaggagggggttacagcgagccaatatcgcaccattgcactccagcctgggcaacagagcaaaactccatctcaacaaaactaaacagaagggctctgcaccggaattctagaagtctcactggtctcttcatgcccaggggacaagctaagggataaggtagtagatggtagggtaagccctggagcctgcctgcctgggtctgaatcccaaaccatctgccattcaattgcttcatgactctgcttaactcagagcctcactttcatcaaacggggacagcacctgcatcctgggcctgcggcgaaggctgcaggctggccagcacacactgagcactccttaactgtctgttattaatatctgctgtaaaaggcctgatcggaagctgtcagcagaggggctggggtgagaactgagattctttttttctgcccatgcagcacacgttacgctgagtctagctctcggtggatgtattactaaacccacagaacgctttttacttttttgtatttggtcagtgacatttcaaatttgggaggttttatattcaacaagaggatttttgaccaggcgcggtggctcacacctgtaatcccagcactttgggatcagccgaggtgggcggatcacttgagtccaggaatttgataccagcctgggcgacatggcaagactgtgtctccacctaaaatacaaaagttagccaggtgcctttagtcccagctactccggaggatgaggtgggagaatcacttgagcccacgatgaagaggttgcagtgagccaagatcacgtcactacactccagcctgggcaacagagtgagatcctgtctcaaaaaaaaaaacccaacaaaaaaaaagaggatttctggctttgaagaatggaaaaagctgcagatgaagggccaatcctcgtagctgcagagtggcagccacccgctctgggtggggtttccatttcatcagactccactactgcctcttacccagtcctcactgatctcaatgcccatccccaagaacatcccagtctactctctgctcaaagcctgagagcaaatcaggctctgagcctgatgcaaatcatcacacccccaggacccaccccagattcttacccagaaacactttgtgaaccgagaaaatcctgcaattcccactccccttaccacgtctgaagctcccaggtgtgtttaaacttgagctgggtcctcggtgagcaatgggcgtggacggcacggagcccgtggcctgcacagctgtgtctgtcctctcagcttccactgagctgggcatgggggtcctgggtttctcctgcttctgctgcacggccagttcctgccgcaaatctgtgccagaaaaaggattcaggaattcaagtcctcagccaggcgcagtggctcatgtttataatgccagcactttgggaggccaaggcaggtggatcgcctgaggtcaggagttcgagaccagcctgaccaacatggtgaaacctcatctctattgaaaatacaaaaattagcccagcatggtagtaggcacctgtaatctcagctactcaggaggatgaggcatgagaatcatttgaacctgggaggccagggtggcagtgagctgagattgctccagcgcactccagtctgggtgacaagagcaagactacgtctcaaaaaacaaaaagggaatttaagtccttgcttagggttggtggggtgcagggagagaggttcaacagtagataccagtcagaaaaaagacctactggggtgaaacactccaggtagaaaccccaaataaagggaaacccacaggaccttgcctagcagacttggaactctacaggatgtttctcttgactaacaaaatggtttcagatttttaaaaagctatgacagtgacacactaatgcttttattattgaaaaaacaattccaacatagcagtgtatttagaacactaaatgaaaatatgcccgggagcagtgactcatgcctgtaatcccagcactttgggaggctgaggtgtaagaatcacattaatccagtaagtcgaggctgcagtaagccatgatcataccacttcagcctgggcgagagtgagacctctggctcaaaaaaaaaaaaaaaaaaaaaaaaaaaagaaaaaaaaaaaaaaaggccagttgcactggctcaagcctataatcccagcactctgagaggtcgagatgggaggattgcttgaggtcaggaattttcaggccaacatggcaaaaccccgtctctattaaaaatacaaaaaattagccatgcgtggtggtgagcgcctgtagtcccagctgcttgggaggctgaggcaagacaatcgcttgagcctgggggacaagcagtgagtgcagtgagctgagatcacgccactgcactccagcctgtgtgacagagcaagactgtctcaaaaataaataaagtatgctttccagactatccccaaatgctcctcctcactcatcatcaccataacatgtgggagagcttttcaaccattgttctctgaatttttttttttttttttttttgagatggagtttcactctcttgcccgggcttaagtgcagtggcacagtctcggctcactgtaaatctgcctcccgggttcaagtgattctcctgcctcagcctcccaagtagctgggattacaggcacgcaccaccacacctggctaatttttgtatttttagtagacacagggtttcaccatgttgtccaggctggactctaactcctgacctcaggtgatccacccaccttggcctcccaaagtgctgggaatacaggcgtgagccactgcgcccagctgttctctccattttcaaacataaactttatacatatgtatgtatctactgagcataaaacaagaaaattttttattaagcattactggaaacatacaatatgttgtcctgtgtatgacttactctccccacttcagtggtatgtcttggcaatgatttttgttttagagacagggtctgactcagtcacccaggctggggtgcggtggcacaatcatagctcaatgtaaccttgaactcctgggctcaagtcatcctcccacttcagcctcctaagtagctggaactacagacatatgccaccaggcctaatttttacaattttcatttttgtagagatggggtatcactatgttgtccaggctcatcttgaactcctaggctcaagcaatcctcttgcgtccgtctctcaaagcactgagattacaggcatcagccactgtgcctagccttggcaatctttctaccacaacatttctatctactgttcattttaaccattaacatttcacaaaatacatctatgtacttcatttaaccacttcattactgatggacatctaggaacaactactttattaaacttaagaatttttactttttatcccccacctactggttacacattagaaagcaaatcgacgttataaataattaattgggccagcaacagtgacccacccctataatcccagcactttgggaggccgaggcaggcagatcgcctggggtcaggagttcaagaccagcctggccaacatggtgaaaccccatctctattaaaaatataaaaattagccaggcatggtggtgcacacctgcagtcccagctactcaggaggctgaagcaggggaatcgctgaacctgggaggcagaggttgcagtgagcagagatagcaccactgcactccagcctggacaacagagcaagacgccatctcaaaaaaaaaaaaaaaaaaaaaaaaaaaggtaaaaacaacttggacaatccactaatgaatgtcttttttttttttttttttttgagacaagagtctcactctgtcacccaggctggagtgcaatggtgtaattttggctcactacaacctccacctcccaggttcaagcaattctcgtgcctcagcctcctgagcagctgggattgcaggcacccaccaccataccctcatgttttctatttttagtagagatggggtttctctatgttgtccaggctggtctcaaactcctgagctcaggtgatccacctgcctcagcctcccaaagtgctgggattacaggtgtgaaccactgtgcctggccaaatgcctcattacagtttcaacattctacctctggaagtgccaactgaaaaagagcaaatgctgatgaggtttcaaagttttagccaaatatattggttgccatcaagtcacaaaaataataggctagctggcaattccaccagaaatttctccccacaacatctttgcttcttaagagacagggtctcactctgtcacccaggctggagtgcactggtgccatcatagctcactgcatactccacctcctgggctgaagcaatcatcccaccttggcttcctgagtagctgggactacaggcacatgccatcacacccagctaatctttaaatgtttttgtaaagatggagtcccactatgctgcccaggctggtctcaaactcctgggctcaagagatcctcggcctcccaaagtgctgggattacaggtgtgagccactgtgccagatctccccacaaaactctctgttcctactgagcatcagggtagtttgctgtgtttgtgaattacagaccaggaagcatctttctggaaataaattctgctgcccagaggcagaatcccaatacaaggacttcatctgtgaaccccaaagctatttctctaaatacccataaggggcccttacagggctggatgtctgactgttctcagctccagccagggcccaaggcaagagtctgcccagtgcagtccgacaccctctgattagacaacctgggtgcagagcagggtgtggggtccctgtaaagataatgctgggagagcttgtgggacaagatgttgctcaggtagggagaggggaccatgctggtgaagacaccaaggcctcctgacctctggcttcatccttcagtctctgaacagattccaggagattctctttttcatcaagttcactttccaggaaggcatttctttcgatggcctgattcaagcgctgctcaaagtcttcgagagacatgatcgtggcgctggcgaagagaaaagcagagttatccaagaggacaaaccgcagcatccctccagcaccgcggatccaggaggtgcgaagggtcagacacacctgggcacaagtcccagccccaaacttcctagatgccacagagtgggccaagtcccttaaccttctggggcatgggctctttacctgcagaatgggactcatcatagctcatggggtgcacgaggctgtcatgaggattaaataagatgctgcccacacagcactcagcaataagccaaagccctatcaggactgcatgtggcatttggtggtttgagaagaccactatgctccatcttctcttgcaagctcacaatgccaaccagcattaaaaataacctaatatgactgggcaaggtggctcatgcctgtaatcccagccctttgggaggccgaggcaggtggaagacctgagatcaggagttcaagaccagcctggcaagctt

SEQ ID NO: 80 - DNA, 559 bp, Homo sapiens
  misc_feature: n=a,t,g or c
tacaatgtgcattttattccatatcattatncaatgtttacatatagttaanactctcaaganaacgtcctttaccagttgtatgtggtgtctaaatctttaacatgaaggactgaaaagggtggaaatccacactgattgttatcctacagattgtcatgagctgcacgtgtncaatcaganaggaatggaagtctcagaagagcagcgtggcttacagacccttggctttagtgaattcaggcatgcgggatccatagtctcatcttgtaggtaaaactcaagacaaanataanttanntgttggacagagttcntacattggtacaatgnttnaacaaaaagacccacaggggganccttttngttcaaagtnggcnccaattccacacctgattgtggtntccaacattnaaccttcctgtttgnctccancattgggcccttttgaaagggaacttctcctgcnttagntgagggattcccangntnantaagcccactggtngtttgctaaanncncctacaangtnttggcggcatnaacccgggaaantgg

SEQ ID NO: 81 - DNA, 404 bp, Homo sapiens
  misc_feature: n=a,t,g or c
aggctttttattacattgttacaggcaatgcaattaccgtgagcctggacccgtgtacaatccccaagccacggcaaaacatcaggagaacgcaccgatctcacattntacacagcgcagaacaggntcaccccgantntcaacagaagaccaaaantcactttacaaaaaaaattaaaantaacacccttttttatatttaaaaaagtgccagcccttgagctgcagacattagagacgcccaaggacgtgccgccantgggaacgaggccgccagccacgtntcgcccgtcctggggctttaaagctggaactgaagcgttccagacantcatntctgggagttcctctgtcttaggggttttccctctctactgttggtaatgtgtnaggcattttcagcc

SEQ ID NO: 82 - DNA, 429 bp, Homo sapiens
  misc_feature: n=a,t,g or c
tttaaggtgccgcatgttctttttagtttccatacatcgtctgtcccagagtgaggagaagttgatctccttcccacatccaccacaggctgcgtgagggaagcctggctccccacaacttgctccttctccagccctgcccctctcaattaaagcaatgctttcttttttcttttcttttttttgagacgganttngctctgtcacccgggctggagtgcagtggcgcgatcttggctcactgcaagctccgcctcctgggttcacaccattctccagcctcagcctcccaagctgctgggactacaggcgcccaccaccacgccaagctaattttttgtatttttttagtagagacagggtttcactgtgttagccaggatggtctcaatctcccaaccttgtgatccacccacctcggcctcccaa

SEQ ID NO: 83 - DNA, 549 bp, Homo sapiens
cctctcttccacaggaggcctacacgccgccgcttgtgctgcagccatgtctctagtgatccctgaaaagttccagcatattttgcgagtactcaacaccaacattgatgggcggcggaaaatagcctttgccatcactgccattaagggtgtgggccgaagatatgctcatgtggtgttgaggaaagcagacattgacctcaccaagagggcgggagaactcactgaggatgaggtggaacgtgtgatcaccattatgcagaatccacgccagtacaagatcccagactggttcttgaacagacagaaggatgtaaaggatggaaaatacagccaggtcctagccaatggtctggacaacaagctccgtgaagacctggagcgactgaagaagattcgggcccatagagggctgcgtcacttctggggccttcgtgtccgaggccagcacaccaagaccactggccgccgtggccgcaccgtgggtgtgtccaagaagaaataagtctgtaggccttgtctgttaataaatagttatatacaaaaaaa

SEQ ID NO: 84 - DNA, 299 bp, Homo sapiens
  misc_feature: n=a,t,g or c
gcaggccaaaaccntagtttatttcagcatcagcagtatcttagccatcaaaaaaataaactntaccaagggtgacggaagtntctacagcaaggntaagggctcgccagacggcgaacatcaggggtgcatggtgggcactgcccaggcaataagtnaggaagcagcagggctggtntcgggtgtgggccgggcttnatttctgggcaggcatgaggtcgtcgatggcctggccctgctccagccgctgctccatctcgatgagcagcttcactccgtccaccaccatcttgcaccag

SEQ ID NO: 85 - DNA, 268 bp, Homo sapiens
tttttacctcgttgcactgctgagagcaagatgggtcaccagcagctgtactggagccacccgcgaaaattcggccagggttctcgctcttgtcgtgtctgttcaaaccggcacggtctgatccggaaatatggcctcaatatgtgccgccagtgtttccgtcagtacgcgaaggatatcggtttcattaagttggactaaatgctcttccttcagaggattatccggggcatctactcaatgaaaaaccatgataattctttgtata

SEQ ID NO: 86 - DNA, 297 bp, Homo sapiens
ccttcttaaaaatattacatgttttattatcctgtccccagagggtggtttatccagaaaccaagaaaaaaaatcaatcagaataaactcaaaaaaaaaaggtagggggagcaaaaccatcaaccaccaggcagccaggccatcagcccacctccacctctggagggtccccagagacccacgcccgacgcagacccggaggagcatcagcaaggggcccgggcagagaatcggctatgtcttcattatgagagcaggagagacggcagagatatgttgctaggtgaatatatattt

SEQ ID NO: 87 - DNA, 697 bp, Homo sapiens
gaattccgggagcagtcaagatgtgtgacttcaccgaagaccagaccgcagatctgatcccaagcactgagttcaaggaggccttccagctgtttgaccgaacaggtgatggcaagatcctgtacagccagtgtggggatgtgatgagggccctgggccagaaccctaccaacgccgaggtgctcaaggtcctggggaaccccaagagtgatgagatgaatgtgaaggtgctggactttgagcactttctgcccatgctgcagagagtggccaagaacaaggaccagggcacctatgaggattatgtcgaaggacttcgggtgtttgacaaggaaggaaatggcaccgtcatgggtgctgaaatccggcatgttcttgtcacactgggtgagaagatgacagaggaagaagtagagatgctggtggcagggcatgaggacagcaatggttgtatcaactatgaagcgtttgtgaggcatatcctgtcggggtgacgggcccatggggcgagctcgtccgcatggtgctgaatggctgaggaccttcccagtctccccagagtccgtgcctttccctgtgtgaattttgtatctagcctaaagtttccctaggctttcttgtctcagcaactttcccatcttgtctctcttggatgatgtttgccgtcagcattcaccaaataaacttgctctctggg

SEQ ID NO: 88 - DNA, 905 bp, Homo sapiens
caacacaggggcagtctccaggacctccacaccattaacaagatgagccttgtgctcccttgggctctagagaggaagcccctctgagccctcagcccctctttcctccctctcctaaagtaatttgatcctcaggaatttgttctgccctcatctggccctggccagctctgcatttgacaaatgccaggaagaggaaactgttgagaaaacggaactactggggaaagggagggctcactgagaaccatcccggtaacccgaccgccgctggtcaccatgaaccacattgtgcaaaccttctctcctgtcaacagcggccagcctcccaactacgagatgctcaaggaggagcaggaagtggctatgctgggggggccccacaaccctgctcccccgacgtccaccgtgatccacatccgcagcgagacctccgtgcctgaccatgtcgtctggtccctgttcaacaccctcttcatgaacacctgctgcctgggcttcatagcattcgcctactccgtgaagtctagggacaggaagatggttggcgacgtgaccggggcccaggcctatgcctccaccgccaagtgcctgaacatctgggccctgattttgggcatcttcatgaccattctgctcgtcatcatcccagtgttggtcgtccaggcccagcgatagatcaggaggcatcattgaggccaggagctctgcccgtgacctgtatcccacgtactctatcttccattcctcgccctgcccccagaggccaggagctctgcccttgacctgtattccacttactccaccttccattcctcgccctgtccccacagccgagtcctgcatcagccctttatcctcacacgcttttctacaatggcattcaataaagtgtatatgtttct

SEQ ID NO: 89 - DNA, 343 bp, Homo sapiens
cgcgcggtgtggtggcagcaggcgcaccaagcctcgaaatgcagaacgacgccggcgagttcgtggacctgtacgtgccgcggaaatgctccgctagcaatcgcatcatcggtgccaaggaccacgcatccatccagatgaacgtggccgaggttgacaaggtcacaggcaggtttaatggccagtttaaaacttatgctatctgcggggccattcgtaggatgggtgagtcagatgattccattctccgattggccaaggccgatggcatcgtctcaaagaacttttgactggagagaatcacagatgtggaatatttgtcataaataaataatgaaaacct

SEQ ID NO: 90 - DNA, 335 bp, Homo sapiens
  misc_feature: n=a,t,g or c
tngttgttttattncacatcactccttgattatactgatatggaaaaaggatttagtacagttatgctcagaggaacactggacccatgtggcagggtcaagcaactagaacatgattcaganntcagtgaaagatacacttggacaggaccaagaggcatttcnctgccatgaaacaaggcnggnagggnttctaatacacacaccagggaagcactcctgcccctcagaggtcaaggagctgatcctatnttggtatgaggaatggcttattttcngatgaccacatgtgggnctttttcaacccgccacaagaacccccagaagggttattg

SEQ ID NO: 91 - DNA, 512 bp, Homo sapiens
cttttcctcagctgccgccaaggtgctcggtccttccgaggaagctaaggctgcgttggggtgaggccctcacttcatccggcgactagcaccgcgtccggcagcgccagccctacactcgcccgcgccatggcctctgtctccgagctcgcctgcatctactcggccctcattctgcacgacgatgaggtgacagtcacggaggataagatcaatgccctcattaaagcagccggtgtaaatgttgagcctttttggcctggcttgtttgcaaaggccctggccaacgtcaacattgggagcctcatctgcaatgtaggggccggtggacctgctccagcagctggtgctgcaccagcaggaggtcctgccccctccactgctgctgctccagctgaggagaagaaagtggaagcaaagaaagaagaatccgaggagtctgatgatgacatgggctttggtctttttgactaaacctcttttataacatgttcaataaaaagctgaacttt

SEQ ID NO: 92 - DNA, 347 bp, Homo sapiens
  misc_feature: n=a,t,g or c
naantctattgaattttatttntgagnaaaacatgttacactggagaaaggacattcaggacctgtccncccaagncggtgtccatatatgcaactatattncatgttgtaatacaaaggnttaaactacaaaagtgaaaattaaaagncattgcatatgtggggtaaaggaggggataaaggaagagnccacggttaaggnctttncattctgccttggcaacaaaacgacacagaagagaggcagcacgtttgcccgcgtagaggccctgcggctcagaggaagctggaagcgccggtcagtgccatgcagcagcctgggttctcgctcggctggccantcagtg

SEQ ID NO: 93 - DNA, 3530 bp, Homo sapiens
agatctgccgacgccgcagacccccttcccccagcccagggtcggaggcgagtcgccgggggtcggcagaggtcagcagcctgcgagaccctcccaggctcgtggccctaggcgcggcagctgacacgtaagtctcgtcgcccgacgttgtttcggcgctcagaaacaacgtaaagtaaaggggcggggcagcgttttacaaaccgaaccgtgaatctttgcggtttctctttccagccagcgccgagcgatgggtgagtgtgctctgcattgaggcgggtgaagggaggttgagctcaatcaggccccatcctgcttcacagcctactgaggagtccagacgccccgacccccagccagggacagccacgaggagtggtggccctcgggtttcggccgcccagcccgtctctgggggctgcgaaggctctgggctccgggttccgggcgcgggctgcgggctccgacgggcgccaacatggctgccgcgaggaggaggccccggcctggccgcacgtgtatgatgacaactcggtaatgctgcatactcccgagtgcgcggtggggaagccaaccttggagagctgagcgtgcgaccggccggcgcgggggtctccgggagctggcgagtcgctagcaccgagtcacagtggctcaagcttccttccccgcttccacatgcaggcatctctcgggacaactggcacaagcgccgcaaaaccgggggcaagagaaagccctaccacaagaagcggaagtatgagttggggcgcccagctgccaacaccaaggtgggtgcgagcgtgggcctgtccgcctgggaggtcgccttcccccgctctccagcgtgctcgggtctttccgtgtgacagttgtgcgttctttcttgggctctgatttctctgtagtagggcctgggtgtcctgtccccctttagctgttggataagtaagtaccaaagagggaatgctccctcaggcccccaaacctggagcttaggatttcagagagaaggatactgtgtggggacttgagcttctggagagggtggcgcctcgcgtcatagtcagaagcctagtcttgttttttttacagaggcttaattttcagcatttggggtcaggctttcctcttggaggcaagtagggtgatgaaaaagaatccttaggcgtggttgtggccgtcttggtcacctgtgtgccacttgccaatgcaaggacttgtcatagttacactgactgttgcctcctcccggcccaggttcctctccctcacttgccttgctctccttggtaacctagttcctgtaaccttgtgttttccagattggcccccgccgcatccacacagtccgtgtgcggggaggtaacaagaaataccgtgccctgaggttggacgtggggaatttctcctggggctcagagtgtgagtgaggccctttgggagtgggtgggaaaacgcacctaaacggtcttaagattcaccaagtgggcctggcgcggtggctcacgcctataagcccagcacgttgggaggccgaggcgggcggatcacctgaggtcaggagttcgagtccagcctgggcaacagagcgagactctcagtaaaaaaaaagattcaagtgcttttagcaagtagtctgtggcttagaccaaggcatttgaagtttctccttgctgaaagatcttaaggtagctggggagttctctccacccaggctgtcctgctccaatctctttttttgagattgggtctctgttgctcaggctggagtgccagtggcgtgatcttggttcactgcagcctccgcctcctgggttgaagtgattctcctgcctcagcctcccaagaagctgggattacaggcgtgtgccatcacacccggctgcttctgtatttttagtagagacggggtttcaccatgttggccaggctggtctcaaattcttggctttaagtgatccacccgccttgacctcccaaagtgctggggttacgggcgtgagtcaccgtgcccgacctgctctgatctttctgaactctgcagcctgagagattggggctggtaaagactgcgggttgccaaacataactagaaacgtgggttagggggttgtggaagacgaactgatgccccatggcttgtaaaggctgagagttcccttatttctccttaaggcctcatggggctgaagaacctggaaggaagtgtgccaggccattgtcctcagtttacttatgccaaatttctcctgtgagcaggttgtactcgtaaaacaaggatcatcgatgttgtctacaatgcatctaataacgagctggttcgtaccaagaccctggtgaagaattgcatcgtgctcatcgacagcacaccgtaccgacagtggtacgagtcccactatgcgctgcccctgggccgcaagaagggagccaagctggtgcgtgttacttccctgtaggggttgtggggagggcagcctgactccagccttctcgtgatgaaaactctgtccagttctgctactgaagggagagagatgagagccttttaggctgaggaaggccagcactggggtgtgcagggttcgagaaagctcccagggcctgccttccttccctgagctcatatatttgtatccccttttcagactcctgaggaagaagagattttaaacaaaaaacgatctaaaaaaattcagaagaaatatgatgaaaggaaaaagaatgccaaaatcagcagtctcctggaggagcagttccagcagggcaagcttcttggtgagaaggctgttgtgttggaggtggggagtcgcagagattgagtgtgccgaggcacttttcccttgtctcagttcctttgactgccagccatgcagtctaaagggttcactgataacaggctgcgagcacaaaggggaacgtttggtcaccctattcgtatgaagctgaaatgggaagcattgggtagaagagtctgcataggcccgtgcttggagtctttgtatttggggaagtctctgcccaggctgagggggctgtctcagtgatgaaaactttgtccagttctgctactgacagtaagtgaagataaagtgtgtctgaggagacagctggcttcatgcttgcccccagggtacctgaacccacagagattcttaagcgggtggagaggtttgggtagggccaccttgtcgttgtgctaaggatcacctactctcttgcagcgtgcatcgcttcaaggccgggacagtgtggccgagcagatggctatgtgctagagggcaaagagttggagttctatcttaggaaaatcaaggcccgcaaaggcaaataaatccttgttttgtcttcacccatgtaataaaggtgtttattgttttgttcccacatttatgttgcctgaatatatgactgttttctctgctttatttccttgccctgcaaaactgatctgggtgggtggctgcaaccccttgccttaacctctgcctcctactgtcctgagccaggctcaccacactgtaaagtcc

SEQ ID NO: 94 - DNA, 485 bp, Homo sapiens
gtcgccgctgcggagggagccgccgccatgtctgcgcatctgcaatggatggtcgtgcggaactgctccagtttcctgatcaagaggaataagcagacctacagcactgagcccaataacttgaaggcccgcaattccttccgctacaacggactgattcaccgcaagactgtgggcgtggagccggcagccgacggcaaaggtgtcgtggtggtcattaagcggagatccggccagcggaagcctgccacctcctatgtgcggaccaccatcaacaagaatgctcgcgccacgctcagcagcatcagacacatgatccgcaagaacaagtaccgccccgacctgcgcatggcagccatccgcagggccagcgccatcctgcgcacgcagaagcctgtgatggtgaagaggaagcggacccgccccaccaagagctcctgagccccctgcccccagagcaataaagtcagctggctttctcaaaa

SEQ ID NO: 95 - DNA, 406 bp, Homo sapiens
cactaggaaacaaaggatattttattccttttttctgttgttgttgaggatagatcacgatacagagaacagcaatgggtcacagcgcacggtttggttggtttccgcgggaacacagaggacaggaggggcgggatctgggttgagttcccactctcgttatgaccttcaacctctcactgttcccaagggctgcacggagcctgctgagtctccaacccacctcgctcaccgctctgaccaccgacagcacgagaaacggatgcgggagttgcctctgctgcccatctaaggggacgtaggcagagaagcaaaggcctctgctctccctccatccatcccggtgtgctggccccaacggaacaggagtccttcaactattgcctgccagagacccaattgcagg

SEQ ID NO: 96 - DNA, 489 bp, Homo sapiens
tttttttttttttttttttttttttttttttggaagaaaatgactttattctaattaactcacaaagaataaaatcataacataacagctagtttaaggaggccacacaaacatttgcccagtcccagattctacagagtagggacacccccacttccatttcaattctgaagcaaggaagctaggaatgacaggagaggtttaactgatggttacactttataccctcactatcaattctatttttatactaaattaacttagttatgagagctgattttccatctctccaggttgaacttcttcattaggccaatccgtttgcaagtcggcactgtttcagcacctcattgaaaccctcacagagcttgatgtcaccctggttctgggcacactccagaaactgtttgatctcatagaggcaaggctgctgctgctgtgctgggctgggttccctgaggctcctggtaagtgatgtcaggcctcgca

SEQ ID NO: 97 - DNA, 466 bp, Homo sapiens
cccctttttctgggataagtacatttttggaccaccttgcttattcccttggggactgatcatgattcaccacatttgttctttgcagattattgctcccccagagcggaagtactcagtctggatcgggggctctatcctggcctctctctccaccttccagcagatgtggatcagcaagcctgagtatgatgaggcagggccctccattgtccacaggaagtgcttctaaagtcagaacaggttctccaaggatcccctcgagactactctgttaccagtcatgaaacattaaaacctacaagccttacttctctgtgtggggctcttttttcctgggctatgtctcatacacagtgctaaggacttttcacacattacttttaatccatgcaatagtgctctaaggtaggtgctatcattatacccatattacagatgaggaaattgaggctcagagaagtca

SEQ ID NO: 98 - DNA, 934 bp, Homo sapiens
ggcatccacttcttttccgacaaaacaccaaatggcggatgacgccggtgcagcgggggggcccggaggctggtggccctgggatggggaaccgcggtggcttccgcgaggtttcggcagtggcattcggggccggggtcgcggcgtggacggggccggggcgaggcgcggagctcgcgaggcaaggccgaggataaggagtggatgcccgtcaccaagttgggccgcttggtcaaggacatgaagatcaagtccctggaggagatctatctcttctccctgcccattaaggaatcagagatcattgatttcttcctgggggcctctctcaaggatgaggttttgaagattatgccagtgcagaagcagacccgtgccggccagcgcaccaggttcaaggcatttgttgctatcggggactacaatggccacgtcggtctgggtgttaagtgctccaaggaggtggccaccgccatccgtggggccatcatcctggccaagctctccatcgtccccgtgcgcagaggctactgggggaacaagatcggcaagccccacactgtcccctgcaaggtgacaggccgctgcggctctgtgctggtacgcctcatccctgcacccaggggcactggcatcgtctccgcacctgtgcctaagaagctgctcatgatggctggtatcgatgactgctacacctcagcccggggctgcactgccaccctgggcaacttcgccaaggccacctttgatgccatttctaagacctacagctacctgacccccgacctctggaaggagactgtattcaccaagtctccctatcaggagttcactgaccacctcgtcaagacccacaccagagtctccgtgcagcggactcaggctccagctgtggctacaacatagggtttttatacaagaaaaataaagtgaa

SEQ ID NO: 99 - DNA, 538 bp, Homo sapiens
gcgccgcggtgaggttgtctagtccacgctcggagccatgccgtccaagggtccgctgcagtcggtgcaggtcttcggacgcaagaagacagcgacagctgtggcgcactgcaaacgcggcaatggtctcatcaaggtgaacgggcggcccctggagatgattgagccgcgcacgctacagtacaagctgctggagccagttctgcttctcggcaaggagcgatttgctggtgtagacatccgtgtccgtgtaaagggtggtggtcacgtggcccagatttatgctatccgtcagtccatctccaaagccctggtggcctattaccagaaatatgtggatgaggcttccaagaaggagatcaaagacatcctcatccagtatgaccggaccctgctggtagctgaccctcgtcgctgcgagtccaaaaagtttggaggccctggtgcccgcgctcgctaccagaaatcctaccgataagcccatcgtgactcaaaactcacttgtataataaacagtttttgagggattttaaagttt

SEQ ID NO: 100 - DNA, 1929 bp, Homo sapiens
acccccgcacccagctccgcagaccggcgggcgcgcgcgggctctggaggccacgggcatgatgcttcgggtcctggtgggggctgtcctccctgccatgctactggctgccccaccacccatcaacaagctggcactgttcccagataagagtgcctggtgcgaagccaagaacatcacccagatcgtgggccacagcggctgtgaggccaagtccatccagaacagggcgtgcctaggacagtgcttcagctacagcgtccccaacaccttcccacagtccacagagtccctggttcactgtgactcctgcatgccagcccagtccatgtgggagattgtgacgctggagtgcccgggccacgaggaggtgcccagggtggacaagctggtggagaagatcctgcactgtagctgccaggcctgcggcaaggagcctagtcacgaggggctgagcgtctatgtgcagggcgaggacgggccgggatcccagcccggcacccaccctcacccccatccccacccccatcctggcgggcagacccctgagcccgaggacccccctggggccccccacacagaggaagagggggctgaggactgaggcccccccaactcttcctcccctctcatccccctgtggaatgttgggtctcactctctggggaagtcaggggagaagctgaagcccccctttggcactggatggacttggcttcagactcggacttgaatgctgcccggttgccatggagatctgaaggggcggggttagagccaagctgcacaatttaatatattcaagagtggggggaggaagcagaggtcttcagggctctttttttggggggggggtggtctcttcctgtctggcttctagagatgtgcctgtgggagggggaggaagttggctgagccattgagtgctgggggaggccatccaagatggcatgaatcgggctaaggtccctgggggtgcagatggtactgctgaggtcccgggcttagtgtgagcatcttgccagcctcaggcttgagggagggctgggctagaaagaccactggcagaaacaggaggctccggccccacaggtttccccaaggcctctcaccccacttcccatctccagggaagcgtcgccccagtggcactgaagtggccctccctcagcggaggggtttgggagtcaggcctgggcaggaccctgctgactcgtggcgcgggagctgggagccaggctctccgggcctttctctggcttccttggcttgcctggtgggggaaggggaggaggggaagaaggaaagggaagagtcttccaaggccagagggagggggacaaccccccaagaccatccctgaagacgagcatccccctcctctccctgttagaaatgttagtgccccgcactgtgccccaagttctaggccccccagaaagctgtcagagccggccgccttctcccctctcccagggatgctctttgtaaatatcggatgggtgtgggagtgaggggttacctccctcgccccaaggttccagaggccctaggcgggatgggctcgctgaacctcgaggaactccaggacgaggaggacatgggacttgcgtggacagtcagggttcacttgggctctctctagctccccaattctgcctgcctcctccctcccagctgcactttaaccctagaaggtggggacctggggggagggacagggcaggcgggcccatgaagaaagcccctcgttgcccagcactgtctgcgtctgctcttctgtgcccagggtggctgccagcccactgcctcctgcctggggtggcctggccctcctggctgttgcgacgcgggcttctggagcttgtcaccattggacagtctccctgatggaccctcagtcttctcatgaataaattcttcggaatt

SEQ ID NO: 101 - DNA, 830 bp, Homo sapiens
cccccccgagcgccgctccggctgcaccgcgctcgctccgagtttcaggctcgtgctaagctagcgccgtcgtcgtctcccttcagtcgccatcatgattatctaccgggacctcatcagccacgatgagatgttctccgacatctacaagatccgggagatcgcggacgggttgtgcctggaggtggaggggaagatggtcagtaggacagaaggtaacattgatgactcgctcattggtggaaatgcctccgctgaaggccccgagggcgaaggtaccgaaagcacagtaatcactggtgtcgatattgtcatgaaccatcacctgcaggaaacaagtttcacaaaagaagcctacaagaagtacatcaaagattacatgaaatcaatcaaagggaaacttgaagaacagagaccagaaagagtaaaaccttttatgacaggggctgcagaacaaatcaagcacatccttgctaatttcaaaaactaccagttctttattggtgaaaacatgaatccagatggcatggttgctctattggactaccgtgaggatggtgtgaccccatatatgattttctttaaggatggtttagaaatggaaaaatgttaacaaatgtggcaattattttggatctatcacctgtcatcataactggcttctgcttgtcatccacacaacaccaggacttaagacaaatgggactgatgtcatcttgagctcttcatttattttgactgtgatttatttggagtggaggcattgtttttaagaaaaacatgtcatgtaggttgtctaaaaataaaatgcatttaaactcatttgagag

SEQ ID NO: 102 - DNA, 322 bp, Homo sapiens
tttttttttttttttttttttttgggagcagggagaactttattgaggttatgaatatattctacttgaaactggaaggataagtggtcatgaatttgtggcttatggtaacctttgttaagcatctttctttttctttttttttttggtgagacacagattcactcttgtcccccaggctggagtgcaatggcgtgatctcggctcactgcatcctctgcctcccaggtccaagcgattctcgtacctcagcctcccgagtagctgggattacaggcatgtgccaagcatgcttggctaattttgtatttttagtagagat

SEQ ID NO: 103 - DNA, 320 bp, Homo sapiens
  misc_feature: n=a,t,g or c
acatntcctgggccagctacattttactaaatggtggatgatggcatagtacatttaacagctaaaaagaaaatgcacatgtgaataattattactcaattaaattttcatgtaggaaaataaaatcttggtaaatgaaaaaaactggtcataaggtcataaatcctagaaaccctcatgaggctctcagacaactgggaaccgtttacggtccatgtgtgaaggaagattaatttcaggtaaataacattcaaagtcaattacatatatggctacaaagttagtaattatgtgttataaagattcatataactaagccg

SEQ ID NO: 104 - DNA, 271 bp, Homo sapiens
catttctgaagaagcatttattagcatgcagggcccatgctagaggctccttatttccagggcaaggcagcgagacagagcccattgctcaggacgcagcccagattgcaaagagaggacagcccatggtagcggaagaaattctggcggagagcactgtacttggggtccttctctcgcagctggcggtagggatcgggaccctggtggctgcctggtacctccccacccaggcctcgctccttctccacggtttgcagggcccacatgg

SEQ ID NO: 105 - DNA, 379 bp, Homo sapiens
gggaacgtgaattttaatgagggggcagaccgaggaggtggtggctgcccggagatcagggccaggctgtgctagatggcgcctggaaggggggtcacccaagtctccctgctgtcatttcaggaggccgacccaagtctccctgctgtcatttcaggaggccgaattttttcccaatcccagagaaggtgtcagaggcctggttagcagtcttgtcgatggtttcctgggtggtcttggccagctggtccatggctttctgccccgcctctgtggcctggtccaccacttgctgagctgccgctccggccgctgacacggcttcctgggcggtcccctccacctgttgcttcaggtcctgcaagcacttgcttgccat

SEQ ID NO: 106 - DNA, 253 bp, Homo sapiens
accttactaccagacaaccttagccaaaccatttacccaaataaagtataggcgatagaaattgaaacctggcgcaatagatatagtaccgcaagggaaagatgaaaaattataaccaagcataatatagcaaggactaacccctataccttctgcataatgaattaactagaaataactttgcaaggagagccaaagctaagacccccgaaaccagacgagctacctaagaacagctaaaagagcacacccg

SEQ ID NO: 107 - DNA, 507 bp, Homo sapiens
cgtctgggctgccaacatgccatccagactgaggaagacccggaaacttaggggccacgtgagccacggccacggccgcataggcaagcaccggaagcaccccggcggccgcggtaatgctggtggtctgcatcaccaccggatcaacttcgacaaataccacccaggctactttgggaaagttggtatgaagcattaccacttaaagaggaaccagagcttctgcccaactgtcaaccttgacaaattgtggactttggtcagtgaacagacacgggtgaatgctgctaaaaacaagactggggctgctcccatcattgatgtggtgcgatcgggctactacaaagttctgggaaagggaaagctcccaaagcagcctgtcatcgtgaaggccaaattcttcagcagaagagctgaggagaagattaagagtgttgggggggcctgtgtcctggtggcttgaagcacatggagggagtttcattaaatgctaactacttttaaaaa

SEQ ID NO: 108 - DNA, 401 bp, Homo sapiens
  misc_feature: n=a,t,g or c
catcaaacccctttatttccatttggtcccaaggcttgttaggatagttaagaaagctgncnattgntggagggagaggcttaggagaagcctattactttgcaaggggccttcagaagtcgctgggctcagaaggctcttagtcgtgcttnagagtnagccnttcgaagagatantcgccngccngcttccggcaaccagcctgttgaggttggtcaggtngtcacccatcttcttgataagcttcacttcctcatctaggaagtgagtctccagggaagtcacagagatgggggtccgtgcgggcagaacccagggcatgaagntccaaaagggctggttcagtttttctccaggggccatggcagctttcatggcgtctnggggttttacccacttca

SEQ ID NO: 109 - DNA, 414 bp, Homo sapiens
ccgcagaatggctcccgcaaagaagggtggcgagaagaaaaagggccgttctgccatcaacgaagtggtaacccgagaatacaccatcaacattcacaagcgcatccatggagtgggcttcaagaagcgtgcacctcgggcactcaaagagattcggaaatttgccatgaaggagatgggaactccagatgtgcgcattgacaccaggctcaacaaagctgtctgggccaaaggaataaggaatgtgccataccgaatccgtgtgcggctgtccagaaaacgtaatgaggatgaagattcaccaaataagctatatactttggttacctatgtacctgttaccactttcaaaaatctacagacagtcaatgtggatgagaactaatcgctgatcaaataacgttataaaattgc

SEQ ID NO: 110 - DNA, 379 bp, Homo sapiens
gagtttagaactcaaactttatttgtgctgtaaaggggaagaaaagtgattagtaattatgtacatgacgtaacagaattagttcttaccatacagagcaacataccagtactttcaaccatctacttttacagtttcaatttcacaacagcatacccgagactacttccccatacatgcgtgactaatacactctaaatcccaacgacagtaattgtttgcatcatccccaagtcattggttaagaactgaactaccatgtcaacatatttttaaacatttaaaaaatggaacccagaagacagaaagatcccaacgataaaaataaccatgatttttaaaatttcaagtgaaacttaaagggaagaaggaaatgata

SEQ ID NO: 111 - DNA, 488 bp, Homo sapiens
tggcgccgacaggatgggcaagtgtcgtggacttcgtactgctaggaagctccgtagtcaccgacgagaccagaagtggcatgataaacagtataagaaagctcatttgggcacagccctaaaggccaacccttttggaggtgcttctcatgcaaaaggaatcgtgctggaaaaagtaggagttgaagccaaacagccaaattctgccattaggaagtgtgtaagggtccagctgatcaagaatggcaagaaaatcacagcctttgtacccaatgacggttgcttgaactttattgaggaaaatgatgaagttctggttgctggatttggtcgcaaaggtcatgctgttggtgatattcctggagtccgctttaaggttgtcaaagtagccaatgtttctcttttggccctatacaaaggcaagaaggaaagaccaagatcataaatattaatggtgaaaacactgtagtaataaattttcatatgcc

SEQ ID NO: 112 - DNA, 3107 bp, Homo sapiens
ctgcagtgaacggtgatcacaccactgcacaccagcctggggacacagccagactttgtcacaaaaaagcaaaaacaactggccagtgtatgaggggctcgtgttttttgtttgtctgtttgttgagacagagtctcactctgtcgccagactggaatgcagtggcacattctcggcccactgcaatctctgcctcctaggttcaagcaattatctgcctcagcctcccaagtagctgggattacaggcgcccgcaccacgcccggctaatttttttgtatttttagtagagacggggtttcaccaccttggccaggctggtcttgaacccctgacctcatgatccacccgcctcggcctcccaaagtgctgggattacaggcgtgagcctcccgcccggccaggggcgcgcgtttttaaaacatgggagagggaattgtgcttcacaatcaccatcaggtgtctcgatatcgggtgccacgccgtcccgcttctgaggcgcggcggcccactttggcaggccgaggcgggtggattacctgaggtcaggagttcgagaccagcctgacaaacatggtgaaaccccgtctctactaaaaatacaaaaaattagccggacgtggtggcgcatgcctgtaatcccagctacttgggaggctgaggcaggagaatcgcttgaacccgggaggcggaggttgcgatgagccgagatcgcgccattgcactccagcctgggaaacaagagcgaaatccgtctcaagaaaaaaaaggaaagaccccccctccttctcccgccggaaataccctctttcaggacggcgcgcctgtgcggcgacgcgcgctcagttacttagcaacctcggcgctaagccaccccaggtggagcccagcaacaacagagccaccgcgtcccccaccaatcagcgccgacctcgccttcgcaggcctaaccaatcagtgccggcgctgcaaggaagtttccagagctttcgaggaaggtttcttcaactcaaattcatccgcctgataattttcttatattttcctaaagaaggaagagaagcgcatagaggagaagggaaataattttttaggagcctttcttacggctatgaggaatttggggctcagttgaaaagcctaaactgcctctcgggaggttgggcgcggcgaactactttcagcggcgcacggagacggcgtctacgtgaggggtgataagtgacgcaacactcgttgcataaatttgcctccgccagcccggagcatttaggggcggttggctttgttgggtgagcttgtttgtgtccctgtgggtggacgtggttggtgattggcaggatcctggtatccgctaacaggtactggcccgcagccgtaacgaccttgggggggtgtgagaggggggaatgggtgaggtcaaggtggaggcttcttggggttgggtgggccgctgaggggagggcgtgggggaggggagggcgaggtgacgcggcgctgggcctttccgggacagtgggccttgttgacctgaggggggcgagggcggttggcgcgcgcgggttgacggaaactaacggacgcctaaccgatcggcgattctgtcgagtttacttcgcggggaaggcggaaaagaggtagtttgtgtggtttctggaagcctttactttggaatcccagtgtgagaaaggtgccccttcttgtgtttcaatgggatttttatttcgcgagtcttgtgggtttggttttgttttcagtttgcctaacaccgtgcttaggtttgaggcagattggagttcggtcgggggagtttgaatatccggaacagttagtggggaaagctgtggacgcttggtaagagagcgctctggattttccgctgttgacgttgaaaccttgaatgacgaatttcgtattaagtgacttagccttgtaaaattgaggggaggcttgcggaatattaacgtatttaaggcattttgaaggaatagttgctaattttgaagaatattaggtgtaaaagcaagaaatacaatgatcctgaggtgacacgcttatgttttacttttaaactaggtcaaaatgcagatcttcgtgaaaacccttaccggcaagaccatcacccttgaggtggagcccagtgacaccatcgaaaatgtgaaggccaagatccaggataaggaaggcattccccccgaccagcagaggctcatctttgcaggcaagcagctggaagatggccgtactctttctgactacaacatccagaaggagtcgaccctgcacctggtcctgcgtctgagaggtggtatgcagatcttcgtgaagaccctgaccggcaagaccatcaccctggaagtggagcccagtgacaccatcgaaaatgtgaaggccaagatccaggataaagaaggcatccctcccgaccagcagaggctcatctttgcaggcaagcagctggaagatggccgcactctttctgactacaacatccagaaggagtcgaccctgcacctggtcctgcgtctgagaggtggtatgcagatcttcgtgaagaccctgaccggcaagaccatcactctggaagtggagcccagtgacaccatcgaaaatgtgaaggccaagatccaagataaagaaggcatccctcccgaccagcagaggctcatctttgcaggcaagcagctggaagatggccgcactctttctgactacaacatccagaaggagtcgaccctgcacctggtcctgcgcctgaggggtggctgttaattcttcagtcatggcattcgcagtgcccagtgatggcattactctgcactatagccatttgccccaacttaagtttagaaattacaagtttcagtaatagctgaacctgttcaaaatgttaataaaggtttcgttgcatggtagcatacttggtgttttgtcatgaaattctctagtgatgtgtgggtacgcttaaaactggtgaaaatgtttagggatttaattttgagattggtaatgtgctcaaagttaagtcacttgactttggtatacacttgggtgggctgaggggcaagagccttctttgctgtttaagtcattacaagttaggatcc

SEQ ID NO: 113 - DNA, 343 bp, Homo sapiens
ttttttacactgttaaaaacatttattctgatacattctatcataagttagtacaagatccactctgctacagatgcgtctgtgaagagccttgtgccatccaactagtgactgaatgatgtcccatctcttatccgagccagagcacacatcttccatgctgtccgctgattgcctccaaatccagaagaccaaataatcctttatccccaaagtaggctcaaaacagttggttcaggcattccgggatctgcacccctcttaaatcccaggtaaatcacaagagggataaagccccagcgaatggcaaactggctccccttgaagagctgctgtagtctct

SEQ ID NO: 114 - DNA, 822 bp, Homo sapiens
acggaacagatccggggactctcttccagcctccgaccgccctccgatttcctctccgcttgcaacctccgggaccatcttctcggccatctcctgcttctgggacctgccagcaccgtttttgtggttagctccttcttgccaaccaaccatgagctcccagattcgtcagaattattccaccgacgtggaggcagccgtcaacagcctggtcaatttgtacctgcaggcctcctacacctacctctctctgggcttctatttcgaccgcgatgatgtggctctggaaggcgtgagccacttcttccgcgaactggccgaggagaagcgcgagggctacgagcgtctcctgaagatgcaaaaccagcgtggcggccgcgctctcttccaggacatcaagaagccagctgaagatgagtggggtaaaaccccagacgccatgaaagctgccatggccctggagaaaaagctgaaccaggcccttttggatcttcatgccctgggttctgcccgcacggacccccatctctgtgacttcctggagactcacttcctagatgaggaagtgaagcttatcaagaagatgggtgaccacctgaccaacctccacaggctgggtggcccggaggctgggctgggcgagtatctcttcgaaaggctcactctcaagcacgactaagagccttctgagcccagcgacttctgaagggccccttgcaaagtaatagggcttctgcctaagcctctccctccagccaataggcagctttcttaactatcctaacaagccttggaccaaatggaaataaagctttttgatgc

SEQ ID NO: 115 - DNA, 510 bp, Homo sapiens
ctggcagcgcggaggccgcacgatgcctggagttactgtaaaagacgtgaaccagcaggagttcgtcagagctctggcagccttcctcaaaaagtccgggaagctgaaagtccccgaatgggtggataccgtcaagctggccaagcacaaagagcttgctccctacgatgagaactggttctacacgcgagctgcttccacagcgcggcacctgtacctccggggtggcgctggggttggctccatgaccaagatctatgggggacgtcagagaaacggcgtcatgcccagccacttcagccgaggctccaagagtgtggcccgccgggtcctccaagccctggaggggctgaaaatggtggaaaaggaccaagatggcggccgcaaactgacacctcagggacaaagagatctggacagaatcgccggacaggtggcagctgccaacaagaagcattagaacaaaccatgctgggttaataaattgcctcattcgtaaaaaaaaaaaaa

SEQ ID NO: 116 - DNA, 925 bp, Homo sapiens
tggtctagatatttaatgcaaatcttttacttagcttaactttaaggttaaaaattaccaaaagtactttggaaactattcataggcagatttactgtaaacaaattatttttgaaataatgtttttcgcttttcacaagatggcaccgaaagcgaaggaagctcctgctcctcctaaagccgaagccaaagcgaaggctttaaaggccaagaaggcagtgttgaaaggtgtccgcagccacacgcaaaaaagaagatccgcatgtcacccaccttcaggcggcccaagacactgcgactccggaggcagcccagatatcctcggaagagcacccccaggagaaacaagcttggccactatgctatcatcaagtttccgctgaccactgagtcggccgtgaagaagatagaagaaaacaacacgcttgtgttcactgtggatgttaaagccaacaagcaccagatcagacaggctgtgaagaagctctatgacagtgatgtggccaaggtcaccaccctgatttgtcctgataaagagaacaaggcatatgttcgacttgctcctgattatgatgctttcgatgttgtaacaaaattgggatcacctaaactgagtccagctggctaactctaaatatatgtgtatcttttcagcataaaaaaataatgtttttcataagaatgacaacttaattagaatcaaatctataagcttttaagattttacgtttctagtaagtataatattagcttatttgactagaactcaagcagaataggaatttatgcttgttttatattcaataatgatagttttgaagatatagttgttttattacaccaaaaaatactatattaatcttatttaactaagttttatccaaatcatgttaacttaagaaacatttgatcagttcctatattt

SEQ ID NO: 117 - DNA, 398 bp, Homo sapiens
cagctagaagagattttttattgaagggcgagtctccggcatctgatggcagctacaactggatctcacggaacgcccgcttctccaccagcttcaccttgtacttgcgtttgaacttggctctctctcgaggctcgatcatattcctcctctggaagctcttgaaccggtctcgaaggatgttgccctcgggcttcagggtcctgagcgagtctgtcagctccgagctcagctgcacgtcgatgtcaggtgcctggtacttgagccgtcccagccttcggggcttggcagcctcagcctcccgccgcgcctgccgccgcctccgccgccgcgccagctccgccagcctcagggccacctgggccttgatcccgcgcaccgggaacagctcctggtgc

SEQ ID NO: 118 - DNA, 247 bp, Homo sapiens
ggcaaacacgtattgctttatttagtgtttctctggattgcagaagtgtcagcagtgggctgagacccccagaagggcatagaggcagctgggcagcccccaggcccttgagggtaggagcagggagaagcagcagaaggaggtgatgcccctgccgctcctcccaaggccagccccgtccccacgctcccatgccagggaggggtcaggggccagaaaaggccttacatccttgagtggggcccga

SEQ ID NO: 119 - DNA, 372 bp, Homo sapiens
tttttttttttttttttttttatggggtgtgataggtgtgagtgtctctagggtgatacgtgggtgagaaaggtcctggtccgcgccagagcccagcgcgcctcgtcgccatgcctcggaaaattgaggaaatcaaggacttcctgctcacagcccgacgaaaggatgccaaatctgtcaagatcaagaaaaataaggacaacgtgaagtttaaagttcgatgcagcagatacctttacaccctggtcatcactgacaaagagaaggcagagaaactgaagcagtccctgccccccggtttggcagtgaaggaactgaaatgaaccagacacactgattggaactgtattatattaaaatactaaaaatcct

SEQ ID NO: 120 - DNA, 397 bp, Homo sapiens
  misc_feature: n=a,t,g or c
tttatggtttttatttttcaatttttattttggttttcttacaaaggttgacattttccataacaggtgtaagagtgttgaaaaaaaaattcaaatttcncncggngcgggggaaggagttaatgaaactgtattgcacaatgctctgatcaatccttctttttctcttttgcccacaatttaagcaagtagatgtgcagaagaaatggaaggattcagctttcagttaaaaaagaagaagaagaaatggcaaagagaaagttttttcaaatttctttcttttttaatttagattgagttcatttatttgaaacagactgggccaatggtccacaaagaattcccggtcagcaccaccggatgtccaaaggtggcaatatccagggaagggcaggcg

SEQ ID NO: 121 - DNA, 346 bp, Homo sapiens
  misc_feature: n=a,t,g or c
cgtggtgcnggcaccatgtctcggtagcactgggtgncagcgcctgcagtggtcaggtcccggtattcccggtacatgttgtgngtgccgctccgggagtcatagcgcancagatcccgaagttcttcaccctcaggggaacttctcaaacacctgcccacagtagacaatctcccctgaagacttcttcatcttctttaactgagatacaaagtaccagaagcgggacttggcgacgacatgattaaggcgcaaagattcgcatgcggtataaggggcggcgtgtggcatttgggggtgggcaggcagcgacccactaccttgtactctcgtagcgtgcccgagg

SEQ ID NO: 122 - DNA, 268 bp, Homo sapiens
aaaattaaatttctctttattcaattgcctctgagtagtgctgtgatttccaagtgccaggtagttaggtgtacaaatatacataccacagaaacatacagtttttaaaaaaattaagaaactggctgcatctgacgacatcaagaaaaaagataattctgattcaagggcttctccagaagatggggtttcattggcatgacgctcataggatgacctgtcatttttgtactattttttctagaaccatagagggatgacagtaact

SEQ ID NO: 123 - DNA, 307 bp, Homo sapiens
tttcgcgtttgtttttctttatttctttatttcacatacacattagccattcaatggagaagccggagagagtcaggcaaagatggtataacagaagcgcagtgacgggggcggggtcagggggaggaaggcagttctgcatcctttcttgctttctgtcctctacttgacagagtccatgtcgcgtgtttctttctgcttggctgctggtgcacagctccaccgagaccccttccaagggctctctgagaactgggctgcttctgggggcccgcgggggtccccgggctgggaggagagaagggct

SEQ ID NO: 124 - DNA, 497 bp, Homo sapiens
ttttttttttttttttgtccgacatcttgagacgaggctgcggtgtctgctgctattctccgagcttcgcaatgccgcctaaggacgacaagaagaagaaggacgctggaaagtcggccaagaaagacaaagacccagtgaacaaatccgggggcaaggccaaaaagaagaagtggtccaaaggcaaagttcgggacaagctcaataacttagtcttgtttgacaaagctacctatgataaactctgtaaggaagttcccaactataaacttataaccccagctgtggtctctgagagactgaagattcgaggctccctggccagggcagcccttcaggagctccttagtaaaggacttatcaaactggtttcaaagcacagagctcaagtaatttacaccagaaataccaagggtggagatgctccagctgctggtgaagatgcatgaataggtccaaccagctgtacatttggaaaaataaaactttattaaatc

SEQ ID NO: 125 - DNA, 411 bp, Homo sapiens
  misc_feature: n=a,t,g or c
ctaattactaccttttattctaatgtgaaccatgggccctggaaagctgataacaagcttggctgagcagagggaactaggggtcaggcagaaaggattatgggntggaaaacattggctcttccttgggnagtggatgctngggaaaggggaagagagtggctcancctggcaggtaaataggctagaaaagccaaggccaaanctggngaggggagaggacagtcagcatgtccagcctggggtctgggtgtaagggttatcccttctccctggtgccttcccatctcgtccatgagcctaaggtcttgggagccttgtgttgggaggctgctgtgatgtcagggaacggggatctgtctagcttttggccacttcctggggacctcacacccctgtttganaaattgg

SEQ ID NO: 126 - DNA, 744 bp, Homo sapiens
ctctttcccttcggtgtgccactgaagatcctggtgtcgccatgggccgccgccccgcccgttgttaccggtattgtaagaacaagccgtacccaaagtctcgcttctgccgaggtgtccctgatgccaagattcgcatttttgacctggggcggaaaaaggcaaaagtggatgagtttccgctttgtggccacatggtgtcagatgaatatgagcagctgtcctctgaagccctggaggctgcccgaatttgtgccaataagtacatggtaaaaagttgtggcaaagatggcttccatatccgggtgcggctccaccccttccacgtcatccgcatcaacaagatgttgtcctgtgctggggctgacaggctccaaacaggcatgcgaggtgcctttggaaagccccagggcactgtggccagggttcacattggccaagttatcatgtccatccgcaccaagctgcagaacaaggagcatgtgattgaggccctgcgcagggccaagttcaagtttcctggccgccagaagatccacatctcaaagaagtggggcttcaccaagttcaatgctgatgaatttgaagacatggtggctgaaaagcggctcatcccagatggctgtggggtcaagtacatccccagtcgtggccctctggacaagtggcgggccctgcactcatgagggcttccaatgtgctgcccccctcttaatactcaccaataaattctacttcctgtcc

SEQ ID NO: 127 - DNA, 473 bp, Homo sapiens
  misc_feature: n=a,t,g or c
caggattttatttaaaatttatngtaatggggtccgcgcaaaangnnngggtggagggtggggtacatgcaggggacacaggaacacgatgacatggccagggcacaacttcttctgtcgtggggaagagggatgaaaagacaagaccagggctggagctggnntggnnnanggnnngggtanactggctgcnttnncccgcccccaggnnncacctctaggccctggacccctcgctcaccctggcccctaanactccatctcttctctgcctctggcctcctggctcttcctcctgctccccttgactttttcccctgacagattctcaagtanggaccgatgttcagggcctgaccccaaccccccatacnaccttatgaaggtacaacctttggnnggccctgcttctggccctcctcaaacctcacngntttgcccnctttgggacaagctctgaatcgccntccttc

SEQ ID NO: 128 - DNA, 343 bp, Homo sapiens
  misc_feature: n=a,t,g or c
tttaactaaaatggtcacttttaatgggaaccagaggtatagttacaattacatagtccgacggggggaaacccttgggtgatcaggaatggggaaggttacaaaataacgagggtaacacttgggtacaggacaaaaagctgttccagaacctngggagccaggctaattaatacggcctctccctgcgatcctatctgtgctcacccctggaatccatcttgccagggccaaagccacctctntccccaccaccccngccccctcggaagcctccacggtccccgcctgcanccccggtangccgcctncgatcataagcntcctctngncaccactgacg

SEQ ID NO: 129 - DNA, 137 bp, Homo sapiens
gaagagaagaagaagcaggatgaactgaaacggattgccagagaattggcagaagatgacagcatattaaagtgagtgaccctgcgacccactctttggaccagcagcggatgaataaagcttcctgtgttgtgtga

SEQ ID NO: 130 - DNA, 341 bp, Homo sapiens
cactgtggagcacagttcatttgtcttgttggtttattggcctacagagttggacacacacacaaatgcggagataaatattggtcagtttctctaaatctgggtcctcactacgtatagagctagtctgtagaattctaaattttgcgtgctgcggcacagaaccagtggccttctcactctgccaccacccgtcttcccagggaacatggggaaagagggcacgaactgacaagacttgatcattttcaaaagacaaaactgcaaaatcccaaatttccaacatctgaaactcacaatattcaaattccccagctcaaattacatatattttaatctcc

SEQ ID NO: 131 - DNA, 1272 bp, Homo sapiens
ggcgtgatgtctcacagaaagttctccgctcccagacatgggtccctcggcttcctgcctcggaagcgcagcagcaggcatcgtgggaaggtgaagagcttccctaaggatgacccatccaagccggtccacctcacagccttcctgggatacaaggctggcatgactcacatcgtgcgggaagtcgacaggccgggatccaaggtgaacaagaaggaggtggtggaggctgtgaccattgtagagacaccacccatggtggttgtgggcattgtgggctacgtggaaacccctcgaggcctccggaccttcaagactgtctttgctgagcacatcagtgatgaatgcaagaggcgtttctataagaattggcataaatctaagaagaaggcctttaccaagtactgcaagaaatggcaggatgaggatggcaagaagcagctggagaaggacttcagcagcatgaagaagtactgccaagtcatccgtgtcattgcccacacccagatgcgcctgcttcctctgcgccagaagaaggcccacctgatggagatccaggtgaacggaggcactgtggccgagaagctggactgggcccgcgagaggcttgagcagcaggtacctgtgaaccaagtgtttgggcaggatgagatgatcgacgtcatcggggtgaccaagggcaaaggctacaaaggggtcaccagtcgttggcacaccaagaagctgccccgcaagacccaccgaggcctgcgcaaggtggcctgtattggggcatggcatcctgctcgtgtagccttctctgtggcacgcgctgggcagaaaggctaccatcaccgcactgagatcaacaagaagatttataagattggccagggctaccttatcaaggacggcaagctgatcaagaacaatgcctccactgactatgacctatctgacaagagcatcaaccctctgggtggctttgtccactatggtgaagtgaccaatgactttgtcatgctgaaaggctgtgtggtgggaaccaagaagcgggtgctcaccctccgcaagtccttgctggtgcagacgaagcggcgggctctggagaagattgaccttaagttcattgacaccacctccaagtttggccatggccgcttccagaccatggaggagaagaaagcattcatgggaccactgaagaaagaccgaattgcaaaggaagaaggagcttaatgccaggaacagattttgcagttggtggggtctcaataaaattattttccactg

SEQ ID NO: 132 - DNA, 1496 bp, Homo sapiens
ccattgtgctggaaaggcgcgcaacggcggcgacggcggcgaccccaccgcgcatcctgccaggcctccgcgcccagccgcccacgcgcccccgcgccccgcgccccgaccctttcttcgcgcccccgcccctcggcccgccaggcccccttgccggccacccgccaggccccgcgccggcccgcccgccgcccaggaccggcccgcgccccgcaggccgcccgccgcccgcgccgccatgggagtggagggctgcaccaagtgcatcaagtacctgctcttcgtcttcaatttcgtcttctggctggctggaggcgtgatcctgggtgtggccctgtggctccgccatgacccgcagaccaccaacctcctgtatctggagctgggagacaagcccgcgcccaacaccttctatgtaggcatctacatcctcatcgctgtgggcgctgtcatgatgttcgttggcttcctgggctgctacggggccatccaggaatcccagtgcctgctggggacgttcttcacctgcctggtcatcctgtttgcctgtgaggtggccgccggcatctggggctttgtcaacaaggaccagatcgccaaggatgtgaagcagttctatgaccaggccctacagcaggccgtggtggatgatgacgccaacaacgccaaggctgtggtgaagaccttccacgagacgcttgactgctgtggctccagcacactgactgctttgaccacctcagtgctcaagaacaatttgtgtccctcgggcagcaacatcatcagcaacctcttcaaggaggactgccaccagaagatcgatgacctcttctccgggaagctgtacctcatcggcattgctgccatcgtggtcgctgtgatcatgatcttcgagatgatcctgagcatggtgctgtgctgtggcatccggaacagctccgtgtactgaggccccgcagctctggccacagggacctctgcagtgccccctaagtgacccggacacttccgagggggccatcaccgcctgtgtatataacgtttccggtattactctgctacacgtagcctttttacttttggggttttgtttttgttctgaactttcctgttaccttttcagggctgatgtcacatgtaggtggcgtgtatgagtggagacgggcctgggtcttggggactggagggcaggggtccttctgcccctggggtcccagggtgctctgcctgctcagccaggcctctcctgggagccactcgcccagagactcagcttggccaacttggggggctgtgtccacccagcccgcccgtcctgtgggctgcacagctcaccttgttccctcctgccccggttcgagagccgagtctgtgggcactctctgccttcatgcacctgtcctttctaacacgtcgccttcaactgtaatcacaacatcctgactccgtcatttaataaagaaggaacatcaggcatgctaaaaaaaaaaaaaaaa

SEQ ID NO: 133 - DNA, 274 bp, Homo sapiens
ccaaacgattgmatttattawwaaacaagkgatacagmccctagactcagaaacacaacagatttgrgctaagmcagctctsgbgaaacagtaatagrgggrggvvggaacasgrggtattcatgbcbggbccagagctgccatccagggccccacaccccaccttkggtccagatggcccattggcccaggkgtccctgctgccagaacaccgtggactggggtacaggagttgttgcatattccatgrggctggkgtcgggaagvagggact

SEQ ID NO: 134 - DNA, 231 bp, Homo sapiens
  misc_feature: n=a,t,g or c
ttttttttttttttttttttccagagcaccagaaatttattaaattccccactttcccccaaaacacaattacccacacgcagcaagggggtgcggaggcccccagacctggctcctgcagcctgggccaggaggaccagcatggggacacaggagctatcaggcaggantcaggntgggggacgaggggacacgggatggggtgacagacaaggtagtgcaagggcagag

SEQ ID NO: 135 - DNA, 280 bp, Homo sapiens
  misc_feature: n=a,t,g or c
aaatattctactttatttggtaaaactcagaaactaacaattcacatcctcccaccttcttctttccgaagaaggcagtttgcagagacaaaagggctgtggcgtggggatcatccaccatctccnggntttacacccaggntacccatggcttggcagtcaggnctntaggcnattggctctcagaggcantagaagaaaagtaaaaggnaggtctcacttcacagacattgaaaccctcctaacccttttccccantacccacaantccctacantgc

SEQ ID NO: 136 - DNA, 507 bp, Homo sapiens
  misc_feature: n=a,t,g or c
ccaagccaaactatatctagctttattaaagttactttccataaacaatcagggtatttcaggcaggacatgggcagataatcgttaacggtgtacaacaactttcaaactcccttcttcaatggactagcaaaatcggaaagccactataaaacccagtgaggtcttcatnttatgccctgaacagggagagtttagagtgagggttgacatttcaactttagcatattgtttaacagcttttcatgaactgaccctgacttccaggaaatgaaataaaaatggcagaatttatctgaaaatctgaaaatccacaatctaagaaatnggaaactctactctttttcggggggctccatctcantggcaccactgggaaattnttggttngcctggacacactggtaaccaattactgggagggtcaggggcccancaggagttttgggttttaangggagttaaagtcnaatgtttggaaggatgaccangggtaaaagagggacc

SEQ ID NO: 137 - DNA, 303 bp, Homo sapiens
acatcacaacatcgtttattatgtgamtyyyyyacaatacaaacaaaamatacagaaatgcaatatatgavtacagctaaatgcagamtggtgactttcytctcttcaagaggccatgattcccatttctagtaaaataaagagactgcatataggtagaaacaggttggtcattagcttcacaattttgcctagaaatgatctataamtgcatttccccccctkytacttaccataaagtgtaaaaagggrgttaaaggaaagyyccttkttggktccyaccawatgavgadggtatattct

SEQ ID NO: 138 - DNA, 228 bp, Homo sapiens
  misc_feature: n=a,t,g or c
aaaataaacagacatttatttccagacttatcttttacataagttaaatacacatttgtctgaggcactgaaacattcacatacacaacccaaattcccaggntttgtcagcagancaatgttaataacaaatcaagtttttttttaaaaaaaacagtgaacagtgttttatacaagcatattgactatttctttcttaaccttaaacattctaaacgtaaaattgta

SEQ ID NO: 139 - DNA, 315 bp, Homo sapiens
  misc_feature: n=a,t,g or c
tttatatttttattctttatttttaaaatttatgtatgttcgtgaggcacaagtgcaattctgctacattgatatcttgcttctcagtcccacacaaggaagctgtctcacactatagaganaatattcatgaacaaattcgtatcagtcacagtgagaggtaacactctaaatagcccatttcatgctcaagacatccaagtcaaagaaacccaatagcacagctgagtcccctctgttccccccccaacaccccactcacatcagggcccctgcctgggaggtgtcacctttattagctgtgaggagacaccc

SEQ ID NO: 140 - DNA, 470 bp, Homo sapiens
  misc_feature: n=a,t,g or c
ttttggagagaaggataagcaatttattaaccccacgcccctagcaccagctgtcaccttggacttgttggagatgcaggggctagaaaggaaatgacagagtgtacaggccccttcgaccccgtgtcccataggtnggttggcccccagacacaccctctctgctggcagtgcagaacatgcatcccaataccctagaggagaaacaccaccccagggagagccctttctgctccaacctcctgggcaggtcccaggttggggcagcagcaatctgcaggtgtttgtcaggcctggccacacattgcggacagaggatacgactggggtaccctagggtgtggggagggtcggcctggggtcagggggcatgaaggctgtgttccagactcctcctgcccccaatcctctgtgcccctgctggagctctcctagcttctctgatctgtgctcctgtctttgggggaagc

SEQ ID NO: 141 - DNA, 5985 bp, Homo sapiens
tcgtactgtcgcttaggccgacccgctcgcagcgacaaccagccctctacctcttttcgctctcccttaagtaataaaccgtctttccttatgacgagtcttaaactctttgggaggaataatgccggcgtcttccggaacccgacctcgccccgtgacctcagaggtatacttccgggacacggaagtgacccccgtcgctccgccctctcccactctctctttccggtgtggagtctggagacgacgtgcaggtaggagcccgggcgcgacaatcggggggcatctgcggcgaggggacctgtggggcttgggacgagagacgggggtctttccgtgggaaccgagctaggtgccgggcaagagacgcgcggctggcccacctggatcctggccaactcgggattgagttcattcctggtctcagaaggcccgttttgcttcagggaggagcttgtgaagtaagggtgagcgtggtccagccttttaagcctcggccccgcaatacggcggcacggccgcgtttgagctgcacagcgtagttgagggaacccgggacagacgtgggctcccgctctacctcgccaaacttttttcttggtgatcgcaggcccacgctaatctcgtttgtttcctcgtctgcaaaataggaataacaatagcaccgatcccatggtttgtagtgatcattcaaagaaggaaagcagggaaactctcgcactatgttggatgcttctaaatctggcgattctttgcgttgctgagtcgggcacgttgcaagttctggcgctcaggcccagcaccaatgtttgctgtcgcttgccctcgtttgatatactcctgatgaccactctgctcgttactttagggatgttagaacggagaaactgcaaattggcatttactgaatggccatcatgccgaaacatactcatgcttacgtatttgagatatgctggagcctttctatgcttctcgaggcagaactttgggcttctctcctgtggcgcgttccttacaatagttaacgcactgggtcgtgctcattggtctgatttgaagataggaacatttaacttcgtacacccaagacttacacttgaagtacttactgtggtcacacacttaactgaaagtttatatagggaaggcagaggagagatctaggaacacctgagacagactagggtaagttatttgtggtgtagaggcatcttgccactgtctttactgtgaccataggctgagacactctctatcttcaccatctgcaggatatcgattagtgttagtgtcttctgaaaatgttaaattgttctgaacaccaggaggttcagaaggcctgggctttaggcggaagcagtcttatcctagccttccactttctcattcattctcacccgccttcctcctgtcagtttctctctcccttagatcttgtgacagtatgattgcaattattatgcaaggtcataataggttagagttattttagtctcaggacccatcagatttctgagatgggtcttttccattagcctgccttttggatatattttagtgcctttgatatttgatgttggtgacaaagatttagttctaaatagttgtgggagtcaaatcagttgcatttttgaacattttgaagggatcaggtggagcacaggaaaacaggagatgagaggcttgagggctgtgttggtaagggacccttgaattctaagctgaggagttcatgcaggaatcaagcagctccctcgccccatgaaggtgttaggaatggtaccagtacatgggtagctgttggtcttgggtttcttcttgccttttggggtgcagccttcagcgatctgctgctagatccctaggcttctatcttgtaggtgctgtgagctgagctgttggtagtttctggggaaaggatacttctcatggtactttgccatatggccacagttgatacccccccaagtgcaaggagaaagaagttttagtgaggcagaaatgagagattacagtagagtattggatggagagtacagggacataagcaggactagggtttcatttaatagccagggaaagggatttctgaaatattttgtctgttaaccttatttcttttccttccactcagaaatggcacctcgaaaggggaaggaaaagaaggaagaacaggtcatcagcctcggacctcaggtggctgaaggagagaatgtatttggtgtctgccatatctttgcatccttcaatgacacttttgtccatgtcactgatctttctggcaagtgagtacctgggtggagaggcatccagctggcaaaaggctgaggaaggtaatggctgggacgggctagcagttcaggggattctctctaaagaaatccctgttttgtccaggtaagaaaatgtgcttgtccatttagcccacaaatattgtgatttcccaggggttacaagagaggagacacattcttcgtccttaacagcgtgatggtcattgaatccttggtttcttgggaattatcttctttccctagttccctttgcagagcagcatggactgcaatgggctctgggtgcgggttcgacggccatttagcaagttgtgacttgtgtgaaatcactcagattctgagttttggtttcctcatatgtaaaattaggacagtaatgtctaccttgtggagtaatggtaaggattaaatgcaaaagtagatatataaaatgttaatactgagtatagcttatattggccatcaaccccactgactaactccatagagagcccatgaccatcatcctccaccatgactgagctgtgttgctcttcactcattaggatatcgtaagcattccttgttggacgaggaagaaatgaccctgtgcttttgtccccagagaaaccatctgccgtgtgactggtgggatgaaggtaaaggcagaccgagatgaatcctcaccatatgctgctatgttggctgcccaggatgtggcccagaggtgcaaggagctgggtatcaccgccctacacatcaaactccgggccacaggaggaaataggtacgagtcgcagaggggatggctgggtggtagaaaacctgctgggcttgggtgctggagcacctggatttgaggtttgggttttttgttgtgaccttgaacaagatattttaggcatatacatacttaataattggctcctgtgtacaccagcagctcagtgttgagcaccactgtatactaggagctgtgtttcaggtactagaagagagtgatggggaaacagacatggtctctaccctccttgtgtgggaccgaggctggtgggagagtcagactttaaacaacagagctccagggagtatgtggttttcatttgtgacaaatgccaggaagcacaagtaaggagctggtgataaagtgtaatttaaactagggtctaaatgataagtccggagtccttccagtgaaataaggacaagaggaggtattccagctagagacaactgcagggaaaggtcttgaggtgggggtgaacctgggcactatgaaggaaagagtggcatgaggtgcagtcagaggggaagaggtggagtcctgtaggagaggggaaggacctggatttgagtgatgggggcatgaaagctaaatagatgactgttgcgtgaacaagccagacatggtcagaacataacaacaaaccatatggccccctcagcctaaaatatttactgtctggctttttttttttcctcttttttgagacagggtctcactctcacccaggctggagtgcagtggcgctatctcagcttactgcagtctctggctttcaggctctagcagtcctcccacctcagcctcccgagtagctgggactgctagtagtagtgccaccacgcctggctaaattgtgtatttttgtagagatggggtttcaccatgttgctcaggctggtcttgaactcctgagctgaagcagtccgccctgccttagcctcccaaggtgctgagattatgggtgtgaaccactgtgtacagccctgtctggctctttacagaaagtttgcagacctctgaactagcggggtgttgggatcttagaaagaagatcttccattacttgccaaaggctcttcttaacttaaaccttcattttctaggaccaagacccctggacctggggcccagtcggccctcagagcccttgcccgctcgggtatgaagatcgggcggattggtaagtgcccccctctagctaatgcttgggtttattttgaagcattggccccaaaaagcacgtgctgtcccagtggatgtgcagcggctggtctggtcacttttggcagttaagtttgttaagggaggctgcaagaggcaccttgtgacttaaaaatctctcccctgaatatctctgtcaccttgatatgcaatgtcctgtttcatttgtgaatctctgtcctacactgcctgtgcagtaaaactgacaagagatgaattgtcctttcctccattcttaggtcattgctattagcatttttgtgtgtaccatctcctgcattgtaggatgttcagcatttttggtttccgcctactaaatatcagttgggcatgccagtcgtgtgacagccaaaaatgaagtggggggtaccagcttctgttattaataccctcaggcctgtgatctcctggctccttacagctcttaggaagggaacagtagtctttccctgcacattgttctgtgcagttagtagcgacatacactgacgccccaggccaaagttcctactgtgtcctacttgaaggatgattttgttttcttgagacagtgtctggctctgttgcgtgggctggaattcagtggcacaatctcagctcactgtaaatttgcctcgtgggcggatctgtccaaaggatcctcccacctgcatctaccgagtagctgggacaacagtgtgtgccacacgggctttttttttttttttttgtagcggggagtttcaccatgttgcccaggttggtcccaaactcctggcctcaggcgttccaccagccttagtctcccaaagcccaaagtgctaggattacaggcatgacgcaccggcgcccagccttaaaagattttttcagactttttttcagtgtctttttacttaatgaaaacgagacagttgcagttaccctgtctagaagggttttttcctctagagaagacggtgggctagatgtcagaacctggatttgtcctgtgcctctgacatcttgcgcacagctcagcctgtttccctttctggaaagtgagttaagaccacgtcaggaaattcgaggaactggcagatggggccgcttcatgttcacatccatctgttaggtactggggagtcatttggggagcagcaggatctgttgctgattggttaggccattggtctagggagtcctgggggcccttcccatccagctccaggcaatgacgctttctcttcctccccacagaggatgtcacccccatcccctctgacagcactcgcaggaaggggggtcgccgtggtcgccgtctgtgaacaagattcctcaaaatattttctgttaataaattgccttcatgtaaactgtttcaactccagtcttctctccttcatcaggggctactcaggcattttgatttcttcctcctatttggcttcttggagaagagcctgagagagctgagatcctggtgctgcatttggggtcttttccatgctacttgcggcattaagttgccttggtcatctaaagcagaccaaggcgttggagacctcgttttgagtggagatgctggttctaaatatggaccaattcttaaagagccagagtgggaactgttgatccaagtgtagcctgaagcgaaagaggagccttccagacccatgccatatataaacacacgtgggtgtgcattctccccccacaccttctgtgcaaagctgggagctc

SEQ ID NO: 142 - DNA, 408 bp, Homo sapiens
tttagagatggagtttgacttttgttgcccaggttggagtgcaatggtatgatttcggctcactgagacctccactttccaggttcaagtgattctcctgcttcagcctttgaagtagctgggattacaggtgcctggtaaatttttgtatttttagtaaagacagggcttcaccatgtcggtcaggctggtctcaaactcctgacctcaggtgatccaccggcctcagcctcccaaagtgctgggatcacaggcatgagccaccatgcctggctgcatcttacactttaatatccttactgttccataaaaaatgttttaaataatgcccacctaataaaagaatctctcatatctttggtgcagcaacaattggtcacatgctttcacatgtgaatatagcaggaa

SEQ ID NO: 143 - DNA, 335 bp, Homo sapiens
aagcgaggtgagatgccggtggccgtgggtccctacggacagtcccagccaagctgcttcgaccgtgtcaaaatgggcttcgtgatgggttgcgccgtgggcatggcggccggggcgctcttcggcaccttttcctgtctcaggatcggaatgcggggtcgagagctgatgggcggcattgggaaaaccatgatgcagagtggcggcacctttggcacattcatggccattgggatgggcatccgatgctaaccatggttgccaactacatctgtcccttcccatcaatcccagcccatgtactaaaaaaaaaagtctttgagtaaaaaaaaaaa

SEQ ID NO: 144 - DNA, 267 bp, Homo sapiens
  misc_feature: n=a,t,g or c
gcaatctttattctgcagagggacaatgaccacagatccatacaccacgtggagaccgaggggcggggagcagggncagtctttcaggggtgggcaggtccaggcggtgggcagagctcgggtgggtgaggggcagatgggcaggggctaaaaaaaagatgaaccacacagcaggggtgctgggagctgctccccacnctcccccatcccaccagccagcacccagagggncaacccttnacacgaccggcccaggatccacccagg

SEQ ID NO: 145 - DNA, 333 bp, Homo sapiens
  misc_feature: n=a,t,g or c
ttttttttcttttcaataatgtctgacatttattgaaaataaggaaaagactttctccaggtagtgtattagagcagagcagaatgaggggttactgtgttgaacaaaaggcacacatcagagagacagttgcaaactcagaatactgcgttatgggcaaaactaactggtccacaagagaaaatgagagactcgatttggctgccaggaacacctgggcctaggcaagaacacaagaggtttctgggggtggggaggaaataggtctcgctgaaggtgacagatcccttggggggcggccagtngtctggatcactgtccagggactgtgtc

SEQ ID NO: 146 - DNA, 1891 bp, Homo sapiens
ccgaggctataagagggcgcacaagtggcgcggcgcaggagccgccgccagtggagggccgggcgctgcggccgcggccggggcgggcgcagggccgagcggacgggggggcgcgggccccccgggaggccgcggccactcccccccgggccggcgcggcgggggaggcggaggatggaaacacccttctacggcgatgaggcgctgagcggcctgggcggcggcgccagtggcagcggcggcacgttcgcgtccccgggccgcttgttccccggggcgcccccgacggccgcggccggcagcatgatgaagaaggacgcgctgacgctgagcctgagtgagcaggtggcggcagcgctcaagcctgcgcccgcgcccgcctcctacccccctgccgccgacggcgcccccagcgcggcaccccccgacggcctgctcgcctctcccgacctggggctgctgaagctggcctcccccgagctcgagcgcctcatcatccagtccaacgggctggtcaccaccacgccgacgagctcacagttcctctaccccaaggtggcggccagcgaggagcaggagttcgccgagggcttcgtcaaggccctggaggatttacacaagcagaaccagctcggcgcgggccgggccgctgccgccgccgccgccgccgccggggggccctcgggcacggccacgggctccgcgccccccggcgagctggccccggcggcggccgcgcccgaagcgcctgtctacgcgaacctgagcagctacgcgggcggcgccgggggcgcggggggcgccgcgacggtcgccttcgctgccgaacctgtgcccttcccgccgccgccacccccaggcgcgttggggccgccgcgcctggctgcgctcaaggacgagccacagacggtgcccgacgtgccgagcttcggcgagagcccgccgttgtcgcccatcgacatggacacgcaggagcgcatcaaggcggagcgcaagcggctgcgcaaccgcatcgccgcctccaagtgccgcaagcgcaagctggagcgcatctcgcgcctggaagagaaagtgaagaccctcaagagtcagaacacggagctggcgtccacggcgagcctgctgcgcgagcaggtggcgcagctcaagcagaaagtcctcagccacgtcaacagcggctgccagctgctgccccagcaccaggtcccggcgtactgagtcgggcatggcggccacctccaaggggcgggctcgcgggggggtgtcgtgggcgccccggacttggagagggtgcggccctccacccccccctccccgagtgtgcccaggaactcagagaggcgcggccccggggattcccccccgaggtgcccaggactcggaaggggcgccccggactcgacaagctggaccccctgctcccgggggcgagcgcatgacccccccgccctcgcgctgcctctttcccccgcgcggccgccccgtgttgcacaaacccgcgcgtctcggctgcccctttgtacaccgcgccgcaagggggctccgagggggcgcacgtcaaaccctgcctttcctttacttttactttttttttttctttggaagagagaagaacagagtgttcgattctgccctatttatgtttctactcggggaacaaacgttggttgtgtgtgtgtgtgttttcttgtgttggttttttaaagaaatgggaagaagaaaaaaaaattctccgcccctttcctcgatctcgctcccccttcggtctttcgaccgtccccccctcccctttttttgttctgttttgttttgttttgctacgagtccacattcctgtttgtaatccttggttcgcccggttttctgttttcagtaaagtctcgttacgcca

SEQ ID NO: 147 - DNA, 285 bp, Homo sapiens
  misc_feature: n=a,t,g or c
acttgggaaccagctttatttctgatttttttttttttatcagagtataaaaaagtgagtgcagcaaaacaaggaagacgagacaggcgtgcgtgggccagggcaagacagaggagaagggagggaagcagaggcagaagggccccttgggcgaaggctgatggtgggaggcgggcagaatacttgcgcancacacaggggcagggntgagggtctccccgtggtgggggcttacaggatgggagcggccaggccatttgtncaaattccacctgggacctgcag

SEQ ID NO: 148 - DNA, 254 bp, Homo sapiens
  misc_feature: n=a,t,g or c
cagcagacacagacacagatgtttattccaggaagaggtctaagaaacgagcttcttagagcatgtgtcacggggcagccagtcctggggctctcagagcagccccctcccttcagcagctgaagcaatagcgcccccattttacaggcggnatggaagccagagaggtgggtnggggagggggtccttccctggctcaggcagatgggaagatgaggaagccgctgaagacgctgtcggcctcagagccctgg

SEQ ID NO: 149 - DNA, 476 bp, Homo sapiens
ggttggttgctgccgaaatgggcaagttcatgaaacctgggaaggtggtgcttgtcctggctggacgctactccggacgcaaagctgtcatcgtgaagaacattgatgatggcacctcagatcgcccctacagccatgctctggtggctggaattgaccgctacccccgcaaagtgacagctgccatgggcaagaagaagatcgccaagagatcaaagataaaatcttttgtgaaagtgtataactacaatcacctaatgcccacaaggtactctgtggatatccccttggacaaaactgtcgtcaataaggatgtcttcagagatcctgctcttaaacgcaaggcccgacgggaggccaaggtcaagtttgaagagagatacaagacaggcaagaacaagtggttcttccagaaactgcggttttagatgctttgttttgatcattaaaaattataaagaaaaaaaaaaaaaaaa

SEQ ID NO: 150 - DNA, 395 bp, Homo sapiens
tttttccatgggatgagtttttaatgtgaggcaaaatcagtccacaatacaaaatctaaaaatcacacccacttttcccacctggctcccggggaggggggaagctgggggtttcttttgcctgcagggtgtggggaggagcagaggagggccaagaaagggagaaggaaacagaggccacagaggcctggctggaggtctcctgctgccccctgccctgtcctggagctgcccttggcctcctgtgccctctaccggtgcacgcctgtgtgggcccagcccccatctgtctggtctggccctgagaggctcgggcaccagctgcatcatttctctttcttctccagccccttcgatgctgatgcctctgttccctctttggattctgtcactgc

SEQ ID NO: 151 - DNA, 98 bp, Homo sapiens
tttttcactaaagggccaagctttattgttctttagttctgtccccctcctgctgccccaggagtagggctggctgaggctctgggcccagatcctgg

SEQ ID NO: 152 - DNA, 332 bp, Homo sapiens
acagtctagtgtttattttatgttatggaaggtacacttgaatttcaaaaatttaaaacatatataaaaagtggttagggactaacatttgtatcaacagttgataaatgtctaagattgtttattatacagcagggtacaatggtagtgctaatgccaacagggcaccatggaagttagtctaaaaattatcgctaggctttatacaagcaacaacatatgctgctgctcttagaattttgggaaatgatctgcttctaatactaagcagttctttaacatttttaaatgttatacagtgttacagtatttagtttggcaaatgtttcaaa

SEQ ID NO: 153 - DNA, 194 bp, Homo sapiens
tttttttttttttcccactagaacagaaataaattttaattcattgaaaagtgcagcagtgaacagggtccttttgaagggcactttctaagtcaaatgactgagatgacacagagcaagggcagaataggaacagaggatgcaaacacaggaagttacaaaattcagtgggaactaagtggtggtaaaactcc

SEQ ID NO: 154 - DNA, 246 bp, Homo sapiens
gagctcccgtgagtggttaatagggtgatagacctgtgatccatcgtgatgtcttatttaaggggaacgtgtgggctatttaggctttatgaccctgaagtaggaaccagatgtcggatacagttcactttagctacccccaagtgttatgggcccggagcgaggagagtagcactcttgtgcgtgatattgatttcacggaggatggtggtcaagggacccctatctgaggggggtcatccatgg

SEQ ID NO: 155 - DNA, 698 bp, Homo sapiens
ttttcctttcgctgctgcggccgcagccatgagtatgctcaggcttcagaagaggctcgcctctagtgtcctccgctgtggcaagaagaaggtctggttagaccccaatgagaccaatgaaatcgccaatgccaactcccgtcagcagatccggaagctcatcaaagatgggctgatcatccgcaagcctgtgacggtccattcccgggctcgatgccggaaaaacaccttggcccgccggaagggcaggcacatgggcataggtaagcggaagggtacagccaatgcccgaatgccagagaaggtcacatggatgaggagaatgaggattttgcgccggctgctcagaagataccgtgaatctaagaagatcgatcgccacatgtatcacagcctgtacctgaaggtgaaggggaatgtgttcaaaaacaagcggattctcatggaacacatccacaagctgaaggcagacaaggcccgcaagaagctcctggctgaccaggctgaggcccgcaggtctaagaccaaggaagcacgcaagcgccgtgaagagcgcctccaggccaagaaggaggagatcatcaagactttatccaaggaggaagagaccaagaaataaaacctcccactttgtctgtacatactggcctctgtgattacatagatcagccattaaaataaaacaagccttaatctgc

SEQ ID NO: 156 - DNA, 285 bp, Homo sapiens
  misc_feature: n=a,t,g or c
gaaaagcaacttttattgaagaatttggagggaaggttccatattatattataatagtaaaaatactaaagttgaatgttgtaaaaaaacgccgtggtgcagcggcantcnagcgtnctnggccaggaggcgtggaggggcccagggatggccacccccacaggagtcagggagggcctgggngacacggaaaggttaagcgtcgaaaaggtcaagtgctaccgtggagagatcatctganggggaggctcccggtggacagtcaccaagaactgtgacacagcg

SEQ ID NO: 157 - DNA, 433 bp, Homo sapiens
ttttggcagcggggagagggaaagaggaggaaatggggtgtgatgggtcaaaggcaggaaaggtaagccatggtcctcaaaccaaagagccctctctgtaggtcctctgatctttgagtgtgagctcaagctctccagtggacacagaaaaaggcctggtagtaagtggtttgcattgtgaggtatgaggatccctggtaaattcagcagcatgtggtttttggaaatcagcccacaagataagaacactgcaaccaaactcataactaatactgctaatttaactattgtccaaaagagaaagggaagaagaaaaaaatccccactctactgggaggttctaggctttcctataagttatccaaatagtctttttttaatctcagggtttcttaagagaattcccattcagtgaccatttctttcgttaaag

SEQ ID NO: 158 - DNA, 385 bp, Homo sapiens
  misc_feature: n=a,t,g or c
ttttgcatcaacatttttattgaaatacaaaaagtgcaaacggtgaaatacatgattggtgccaaggaagtcattaagtgtgaatgtgaacactggattcacacagtacaagcacccgctccctggggtacagaccantgggggacatgagaaanaccaaatagatccgaaaggctccccaggngaatgnnggctcgtgagcgacacttgatnnacaaaggagggcggagagcangancaagccctggncgaggctnngagaccaatgggactgactgnagaaccagcagcagcccaggccccaggggctgggaatgcactgctgattggtcttgggagagcccagcgaaagttatgcccaggcccagcctggctttgccggatt

SEQ ID NO: 159 - DNA, 435 bp, Homo sapiens
tttttggttataaaagcccttttataaagccatttttaaacaaaacaaaaaaaaagtttacaaaagaaaaaaagatacagaaaaagaataacttgcttcatatgtcccaaaaagagaaaaaaataaaggggacaatgccaacatgctcaacaataaaggcttctttttcttatttttttaatacaaaatacaagcaaaggatacacatacttaaaacagagctcaggagcagacacgcagtcctggaaacccttcaataaaagcaaagcaggagtttgttttttctttgtctatgcagatacatacagagactgggatatgtaaaaattaagtatcacaaaagaccatcacacgattctaccaatgcatgttgcatctgtaattcacgaacatggtcaacaaatcatgttcacttcaaccccatttcatttaaat

SEQ ID NO: 160 - DNA, 3196 bp, Homo sapiens
aagcttaggagctgaagaccctggttcaatcccgggcccagagatcatttattctatggctttaggtaagctatttattgatacttctgtgggcctcagtttcattattggtaaaaattatttcattattggtaaaattagacttaagtcctaatccttaagtcagaacagatccaattcttagagaaaaaggatatccagagagaactttctgcggtgtctgggacgcagcagtgccacacgaatggcagctgtgagtaatattcctcctctctggaaatgattcccgggagggactagggcaacgagagccactccaggtctgagaacatggagaacttgagatcagtgcttttggaagtgtggtcaacacagtttgtcaccaaagagataagggtctggcacccaaagataaatgaatgatgttacgaagcacactgtttaggtcagttggcgtatttttccagagcaaggcttctcaggctgggcgtggtggctcacaccagtaatcccagcactttttgggcagatgggttgagcccaggagttcgagaccagcctggacaacacagagaaaccccgtgtctacaaaaaatacaaaaattagctgggcatggtagcatgtgcctatagtcccagctactcaggaggctgaggttggaggacagcctgagcctgggaagtcaaggctgcagtgagccgagatctcaccactgtattccagcctaggcaacagagcaaaactctgtctcaaaaaaacaaaaacaaaaacaaaaaacccaaaagactttctggatgacggaagcagtgtctagattcacattctgaggcaaaacctttattttgtcgtggacaattccagtttgtggcccttccttagggaagcactgcttttgttcccgctgcatgtgctaacttccattcattcatggttctatccctttgtagccttcccttcacacttctcacttgcgtttcttccatctctgggcagactgttccaccaacaacccctcccaggctaagctgcggcgggagctcgacgaatccctccaggtcgctgagaggttgaccaggaaatacaacgagctgctaaagtcctaccagtggaagatgctcaacacctcctccttgctggagcagctgaacgagcagtttaactgggtgtcccggctggcaaacctcacgcaaggcgaagaccagtactatctgcgggtcaccacggtgagctgtgtcccggccacatgctgtcggtcggagcccgacgtgtgatcgagcaggggcatgtgtgcttttgactgagcatttatcacacggcagaaaatagaaaactttaggcgcccctgttgccttgaagcctcatcacccactcagggaaaatataaccctgctttacaaaggagcaaagtaagagaggttccacagcttggccaaggtgtgatagctagacagatgacttggacgggtatttgaaccatgcatgcctggctgccaagcctgtattttgttgttgttgtttttgttttggtgcacaaatctgtgaataaaccagaagcctctgttcttttctcaaagctacaaggctgccctctggcatgtaaaatggcttatgaattagtacatcactctctgccagtgataaaaacttctctctaggccagacatggtgctcatgcctgtaatcccagcactttgggaggcagaggcaagaggatgttgaggccaggaatttgagaccagcctgggcaacacagcaagattccctctctacaaaaaatacaaaaatcagtcaggtgtggtggcacacacttgtagtcccagctattcaggaggctgaggtgggaggattgcctgagccctgaagtggaggctgcagtgagctgtgatcacgccactgcactccagcctgggtgacagagtgagactctgtctcttaaaaaatatatatatataaaataataaaataaagtaaaaaatcaaataaaacttatttctagtactgggaactcttctttttcttttctttcttccctccaggccctctggattccttttctaccctactctgaccaagggctgcctaaagcaaatgtttggaaaccacttttattctttggggtgctccctgggctggtcatttgcagatgacatttgccccaacacatgagtgtctgtgaaccaggtccgttctgtccactgagctgtacttacgtctagatgtataagaagcatggggtcagctctctaggtttccttggaggagcaggaggacttccttatcagaagcctgacttctgttgcagagcgcatgcattttgaccacagtgtttcagctcttcccttttctcttgttccatttaggtggcttcccacacttctgactcggacgttccttccggtgtcactgaggtggtcgtgaagctctttgactctgatcccatcactgtgacggtccctgtagaagtctccaggaagaaccctaaatttatggagaccgtggcggagaaagcgctgcaggaataccgcaaaaagcaccggtaagcaggcgggcctttcctgcgcgtgcagggcccagtgagtctctgggagccacaaaaaaacaaacaaagtgcagactctatagcctggtgggaacgactccgcccggagccagagcccaagaacaaagccaggaagttacgggggaattttatttttcctttggaggatgttttactttggaggataactgttttttatttcagggaggagtgagatgtggatgttgcttttgcacctacgggggcatctgagtccagctccccccaagatgagctgcagccccccagagagagctctgcacgtcaccaagtaaccaggccccagcctccaggcccccaactccgcccagcctctccccgctctggatcctgcactctaacactcgactctgctgctcatgggaagaacagaattgctcctgcatgcaactaattcaataaaactgtcttgtgagctgatcgcttggagggtcctctttttatgttgagttgctgcttccggcatgccttcattttgctatggggggcaggcaggggggatggaaaataagtagaaacaaaaaagcagtggctaagatggtatagggactgtcataccagtgaagaataaaagggtgaagaataaaagggatatgatgacaaggttgatccgttga

SEQ ID NO: 161 - DNA, 397 bp, Homo sapiens
aaggttgaaattaggaatttcttttttattggccactaaagtcctagcaagtttctgacagaagcacagacagaaaatggaaacaaataccttactgggaatgtttccttgcttgcactaaccttgactacagcaataacgcattgcttaacagtcaaagtgcaccaggtcatttccgcaaatggcagggtgagtgactgtgccgttcccaaggaagcaaaacagacacaaacaggtcccacgcgctgggtgtcctggctgagtacagaggaggctgctagaccggcagtacccttttcccaagtgaggaaagccagctgtgacactctgcttgccggcaggggttccccaccctcccctccaccatctggcccatagctgtaccaccaattacatt

SEQ ID NO: 162 - DNA, 245 bp, Homo sapiens
  misc_feature: n=a,t,g or c
ctttttaattgtttaactttattactgttgcaccatttatacaattacatataattbcaatgcatccattgtacatttbbbbgtttttbtyttgtttttyttttccattttccaatgagtggtgtgttggkgtctgtsacacagaatggaagagaaactggaactgcaatgaacgsagactttytyycyyttttttttcatttccactgaccaataaacagaactacaggtgcacccahccangg

SEQ ID NO: 163 - DNA, 476 bp, Homo sapiens
  misc_feature: n=a,t,g or c
ttttttttttttgaatcagtcaattttattccaattcttcacaatttacactcaatatgttgtttccaaaatgtaagtcaccctttatataatagttttattatttcatctttcttttagagtttttttaaaatctttnccttatgtttcttcagtagaagccagantcttgagttgcccagttaggagcctctgacctgctattgtcattaagtttcttctcaatattcatggccaaaatctagcttctaaaagaaaggcttttggtcttttcaatcacttgctgatagggtgagagtacattgttaccataaccacatgacctaatttaggaatcaatcttgggcatccagtcttggcatttctaatcacatttacaatccacctttcaggtttcatcgggagtcatgttcaatttgtctgccaacatgttaatgctgatacacggggggntgtgacggaagncccaatttgga

SEQ ID NO: 164 - DNA, 292 bp, Homo sapiens
  misc_feature: n=a,t,g or c
acacannnnggtttthgtttattaatgttcttgcgraaaatccacagtggccacagctaacatcatygcagcacctttactccttcggctgtgatccaatchccagctcactttthgccagcaccaacathggcctttgcagtccccctgactttcttcattchgttcthgcgttcctttcgttgctttcthgaggtctttttcttctcatacagggcatgtcttgcaagtctatgtthgggttcatttttctthgcataatccmgggaatcataaatcatgccaaagccag

SEQ ID NO: 165 - DNA, 349 bp, Homo sapiens
ttttttttttttactcattacacatttattgtacattttcacaatctggatgcgccacagaattgggggcatggggtgggggaagaggggggcaggggacactgggataatatggggggtctaaaacacagcacccccacctccagcatctctcctaccctttcacaccacagcttagatatccctgctccccctccacacagaaaaccagaagtctggggggaagaaagtttgggggccccctcccgtggcaggttaagggactgtaccctcaaacccttaaaattgtgccatttaaaaagacaatagacccttcctcaatcagttcacccaatgagaggacagctct

SEQ ID NO: 166 - DNA, 331 bp, Homo sapiens
  misc_feature: n=a,t,g or c
tttattaaacttgtacattttactttccttctttcagaatgctaataaaaaacttttgtttatacttaaaaaaaccataaatcagacaaacaaaagaaacgattccaacatcacttctgtgatgagaaaagaggcaatggaattcaacataagcaaagaaaactctacctggaggaaagaaatcgatcagcgaggaaacaactcggggctgctgcagaactgcaggccatgcgaggaggagcctcctagaggatttccaaagcaaacccatccctgccagaccaggaaggcagccgtcctanctcccagagnaacagacctcagccctaat

SEQ ID NO: 167 - DNA, 1044 bp, Homo sapiens
  misc_feature: n=a,t,g or c
tgctgctctcctcccgctccgtcctcctcgcctgccaccggtgcacccagtccgctcacccagcccagtccgtccggtcctcaccgcctgccggccggcccaccccccaccgcaggccatggacgccatcaagaagaagatgcagatgctgaagctggacaaggagaacgccatcgaccgcgccgagcaggccgaagccgacaagaagcaagctgaggaccgctgcaagcagctggaggaggagcagcaggccctccagaagaagctgaaggggacagaggatgaggtggaaaagtattctgaatccgtgaaggaggcccaggagaaactggagcaggccgagaagaaggccactgatgctgaggcagatgtggcctccctgaaccgccgcattcagctggttgaggaggagctggaccgggcccaggagcgcctggctacagccctgcagaagctggaggaggccgagaaggcggctgatgagagcgagagaggaatgaaggtcatcgaaaaccgggccatgaaggatgaggagaagatggaactgcaggagatgcagctgaaggaggccaagcacatcgctgaggattcagaccgcaaatatgaagaggtggccaggaagctggtgatcctggaaggagagctggagcgctcggaggagagggctgaggtggccgagagccgagccagacagctggaggaggaacttcgaaccatggaccaggccctcaagtccctgatggcctcagaggaggagtattccaccaaagaagataaatatgaagaggagatcaaactgttggaggagaagctgaaggaggctgagacccgagcagagtttgccgagaggtctgtggcaaagttggagaaaaccatcgatgacctagaagagaccttggccagtgccaaggaggagaacgtcgagattcaccagaccttggaccagaccctgctggaactcaacaacctgtgagggccagccccacccccagccaggctatggttgccaccccaacccaataaaactgatgttactagcctctc

SEQ ID NO: 168 - DNA, 274 bp, Homo sapiens
  misc_feature: n=a,t,g or c
aaaactaagtcagatttttatttttttttccatagaccacatcatttaataataaaaaaaataaaaataaaahttgaacaaaaggaaaaggtggatataaagtggaacctgtgggaaagaggcaagggnhgcaggacagaagagacnsgggaactygcaggggccctgggactcaggrggagatgctgattmcabctvcataggtgacccagtcctggccccggytgttcccaagagaaggytdtaagtacccaggggggtggwaagcagatgg

SEQ ID NO: 169 - DNA, 398 bp, Homo sapiens
  misc_feature: n=a,t,g or c
aagaatctaaagtgtggattttattccattgcacaatttgctagtgtatttcctgggtagtgtggtgctgaataaataggagtnnnnnnntggggtggggtgggtaagggattcagataagccagaagcagggtgatttttagttggaattgtaaactttagtcagcccccacacgctgctggggaatgtggaatgttctagctctgagatgttaactgagaaaagagaagtcaaacaaagccgatacgtgcagccctgtctacagaatccttcattatccagtttaatcaggagtttcttggtcttttattaacttggtcccaaagaaggaattcaagtcctagataagtaaatcctcaatttgctgttccctgaagtatggaaatgaagttgggcc

SEQ ID NO: 170 - DNA, 529 bp, Homo sapiens
ttttttttttttttttccatgtggcattttatttgtaaatatatgtattacatccctagaaaaagaatcccaggattttccctcctgtgtgttttcgtcttgcttcttcatggtccatgatgccagctgaggttgtcagtacaatgaaaccaaactggcgggatggaagcagattattctgccatttttccaggtctttgagttgcacgtcaaatctggggctgatcaccccacacttgtttagcctgcctgtgaggttcacaacaattttcccagctctgtggtcatcaatgatttcaaattcgccaatgtaaccatgcttcatcatcacagtgagaaccggacgatgactttggagccggcctaataagcacctgcgtttgcctctcttttcggcattgttgatactcttgagagcatctgccaggacattcatgcgcaccattgtggcttagattgcaggatggcgcgatggcagacggatgaaattggagctctcagagagtgctactcaccggggggggaattc

SEQ ID NO: 171 - DNA, 412 bp, Homo sapiens
tttttttttttcaaggttaataaacagctttatttgccttgtacagcatcaattttcttacattctcagttaattggccattaaagtgctggaaattttcttaatcatgataacatttgttaaaaagaaatcagaactaatatcaggaacatggcggcatgaaggaaacagttcccttacaaaacacagaaaatggaagcccctcatgttgagggggtgggttggacaatttgcaaacagattctaatttcctctcaccgtcagcaccaaactggctgggaccaccacccctgggtgaaagaaacaacactaaagaaccctaaaaacacccacacaccctgactaccaccacctctgggccatctgtgggcgtttgctgtttgaacagatccagtctccaggaaagaggaag

SEQ ID NO: 172 - DNA, 329 bp, Homo sapiens
  misc_feature: n=a,t,g or c
gctgctgcatcggttttattcctcatgggtagatgaacacacactggtatatggggaaatcctcacccgccctccgctgctcttctggaggtctgtcctcttgctttcctcctctgccccagcctggtgctgccccaagccctgccctggcaaagagagaactgtgcacagcggggaggctctccaagccagagnctcgcacgcagctgaggaatgacgcaggggcctgcaggaagctcacgcggagacaggtctgtggggccccgcgtcagaacccacttcacatcccaaaagncccanctgcttttgatctttcaatgntggggttc

SEQ ID NO: 173 - DNA, 712 bp, Homo sapiens
ttctttctttgctgcgtctacctgcgagaatgaagactattctcagcaatcagactgtcgagattccagaaaatgtcgacattactctgaagggacgcacagttatcgtgaagggccccagaggaaccctgcggagggacttcaatcacatcaatgtagaactcagccttcttggaaagaaaaaaaagaggctccgggttgacaaatggtggggtaacagaaaggaactggctaccgttcggactatttgtagtcatgtacagaacatgatcaagggtgttacactgggcttccgttacaagatgaggtctgtgtatgctcacttccccatcaacgttgttatccaggagaatgggtctcttgttgaaatccgaaatttcttgggtgaaaaatacatccgcagggttcggatgagaccaggtgttgcttgttcagtatctcaagcccagaaagatgaattaatccttgaaggaaatgacattgagcttgtttcaaattcagcggctttgattcagcaagccacaacagttaaaaacaaggatatcaggaaatttttggatggtatctatgtctctgaaaaaggaactgttcagcaggctgatgaataagatctaagagttacctggctacagaaagaagatgccagatgacacttaagacctacttgtgatatttaaatgatgcaataaaagacctattgatttggaccttc

SEQ ID NO: 174 - DNA, 421 bp, Homo sapiens
tttttttttttttttttttaacacagcactgagttttattagggatttcattaaggttaaatttctaggaatgagggagtcctagttagaggacccaaaagcccacgaagcctcctcagatctcatagtgaaccacccgctctggttctttggagggatcaccgcctcgttccaggtacagattattgtaaggatactgctttggtcccacaggctggtagacagggtacacgtcccccacccagcacatgaatatcatgaaagccaggaaaccgaagagctgcatacacatgacatgccaagaaacaggtgtgggggatgtatccacacggttcctgttgtacatgtctaggtgccagtgcatcggttcaccccagttcaacctcaggcccggctggtcccagctataccatgggatctc

SEQ ID NO: 175 - DNA, 219 bp, Homo sapiens
tttgggatctcagaaaggtttattatcaactgaaggaggtaacatgtagcctttgctggggacaaagatgtgacaagtctctgccccatcctaggtgctgccctgcgtagggatcttcccaggcccgccccccttgggaagcctggtagcgctgggctggcgtggaatcctctggctggatccctcgtggttgctgggttcccgccagggccaatactc

SEQ ID NO: 176 - DNA, 1305 bp, Homo sapiens
ttttcttttgacttgtttgtggatggaatgtttacagacatttctaattactgctttaattaaataaattggatcaaaggccgttcgaggtatttttgttttgccgtttgtcgctcagaattggcattttgagaggtgattgatactgctaacaattttctagtactctagtttgtttcaagaagagattttgggtagacgtaatcttcacctttcaaattatataacaatacgaacattattttttatactgatcataatttccagatttggggagggggtgatcgtggcaggaaaagttgtatgtttgttagttgcatatggtgatttttgatttttcaatgctggtaggtaagtaaggaggtctctgtaccatggctcgtacaaagcagactgcccgcaaatcgaccggtggtaaagcacccaggaagcaactggctacaaaagccgctcgcaagagtgcgccctctactggaggggtgaagaaacctcatcgttacaggcctggtactgtggcgctccgtgaaattagacgttatcagaagtccactgaacttctgattcgcaaacttcccttccagcgtctggtgcgagaaattgctcaggactttaaaacagatctgcgcttccagagcgcagctatcggtgctttgcaggaggcaagtgaggcctatctggttggcctttttgaagacaccaacctgtgtgctatccatgccaaacgtgtaacaattatgccaaaagacatccagctagcacgccgcatacgtggagaacgtgcttaagaatccactatgatgggaaacatttcattctcaaaaaaaaaaaaaaaatttctcttcttcctgttattggtagttctgaacgttagatattttttttccatggggtcaaaggtacctaagtatatgattgcgagtggaaaaataggggacagaaatcaggtattggcagtttttccattttcatttgtgtgtgaatttttaatataaatgcggagacgtaaagcattaatgcaagttaaaatgtttcagtgaacaagtttcagcggttcaactttataataattataaataaacctgttaaatttttctggacaatgccagcatttggatttctttaaaacaagtaaatttcttattgatggcaactaaatggtgtttgtagcatttttatcatacagtagattccatccattcactatacttttctaactgagttgtcctacatgcaagtacatgtttttaatgttgtctgtcttctgtgctgttcctgtaagtttgctattaaaatacattaaactat

SEQ ID NO: 177 - DNA, 223 bp, Homo sapiens
  misc_feature: n=a,t,g or c
tttttttttttggcgtttttatctttttgtattaaaaaagtagtaacagacacaaatatcaaaaacacaaatgccatcgnagacgggtacagctgagaacgcctgggtcccacctgaggggcagcaccagggactccatggtccaccaacctcccccactccagagcagctaggggctggaacccccgggtcctgcttgggcctcaggtctcctcccatctgg

SEQ ID NO: 178 - DNA, 358 bp, Homo sapiens
tatctgctttttgctgctagtttcaaactgccagtatttttccttttgcttttaaaatagttacaatatttttcatgatagccacagtattgccacagtttattataataaagggtttttatttgatttagcgcattcaaagcttttttctatcacttttgtgttcagaatataacctttgtgtgcgtgtatgttgtgtgtgtgcatgtgtggcgtatatgtgtgttacaggttaatgccttcttggaattgtgttaatgttctcttggtttattatgccatcagaatggtaaatgagaacactacaactgtagtcagctcacaatttttaaataaaggataccacagtgcaaaaaaa

SEQ ID NO: 179 - DNA, 349 bp, Homo sapiens
  misc_feature: n=a,t,g or c
tttnggcagatggagggccttttattcgcgagggtcgggggtgggggtcctaggtggggacagacaataaataccgaggaatgtcggggtctcagtgcatccaaaacgtggattggggttgttgggggtcctgtagcctgtcagcgagtcggaggacgaggtcaataaatatccaaaccgccgaagcgggcggagccggctggggctccgagagcagcgcaagtgaggaggggggcgcggtatccccgaaaaagcgggtttggcaaaagcaaatttcccgagtaagcaggcagagatcgcgccagacgctccccagagcagggcgtcaatacacaagaaagctttgcac

SEQ ID NO: 180 - DNA, 540 bp, Homo sapiens
cttttcgatccgccatctgcggtggagccgcaaccaaaatgcagattttcgtgaaaacccttacggggaagaccatcaccctcgaggttgaaccctcggatacgatagaaaatgtaaaggccaagatccaggataaggaaggaattcctcctgatcagcagagactgatctttgctggcaagcagctagaagatggacgtactttgtctgactacaatattcaaaaggagtctactcttcatcttgtgttgagacttcgtggtggtgctaagaaaaggaagaagaagtcttacaccactcccaagaagaataagcacaagagaaagaaggttaagctggctgtcctgaaatattataaggtggatgagaatggcaaaattagtcgccttcgtcgagagtgcccttctgatgaatgtggtgctggggtgtttatggcaagtcactttgacagacattattgtggcaaatgttgtctgacttactgtttcaacaaaccagaagacaagtaactgtatgagttaataaaagacatgaactaac

SEQ ID NO: 181 - DNA, 591 bp, Homo sapiens
atggcgcaggatcaaggtgaaaaggagaaccccatgcgggaacttcgcatccgcaaactctgtctcaacatctgtgttggggagagtggaggcagactgacgcgagcagccaaggtgttggagcagctcacagggcagacccctgtgttttccaaagctagatacactgtcagatcctttggcatccggagaaatgaaaagattgctgtccactgcgcagttcgaggggccaaggcagaagaaatcttggagaagggtctaaaggtgcgggagttggagttaagaaaaaacaacttctcagatactggaaactttggttttgggatccaggaacacattgatctgggtatcgaatatgacccaagcattggtatctacggcctggacttctatgtggtgctgggtaggccaggtttcagcatcgcagacaagaagcgcaggacaggctgcattggggccaaacacagaatcagcaaagaggaggccatgcgctggttccagcagaagtatgatgggatcatccttcctggcaaataaattcccgtttccatccaaaagagcaataaaaagttttcagtgaaatgtgcaaaa

SEQ ID NO: 182 - DNA, 170 bp, Homo sapiens
tttggtcttcactggtctttattgaatgagggttgtcaggagcaaaggtgggatcaagagcagcaaaagcagaaacaagtataaaagtatcaaaaattcaaagtgctacaatgaggaaagtgagaagggttgggttgtggcccagagggacctctgggacacaggattga

SEQ ID NO: 183 - DNA, 407 bp, Homo sapiens
  misc_feature: n=a,t,g or c
atccccaaagcagcatttatttacccattgaattccaaaacatttattttagaagtctggcatttcataatcacccatcttgattgacatgggctgacacacatggcgctgtcaggatacacaaggacaatagccaaagagttacaaaaaataaatccatgattcttaaacaattgcaaccaaaaaaaaaaaaaangttacaagtntcaaanctttcagatgcattgcattgaaanganggtttgtgcacgtcataatttaanggggcaaanccaaggggctactgaaacctcacgttaancagtttattataanggctgatgggnaagggggcaagttgtctctctgtatcaggtttccctttaacagttttccntttaattgaagggaagaggtggggagggggt

SEQ ID NO: 184 - DNA, 302 bp, Homo sapiens
tttgagcaaacgtacaaaggttccaagggacaggaccaagaacgaggggctgagacatttacaacagcaggcattttctcttcctcttcttcacgggaggcgggcagaggactgctcggatcgcttcgtcaaacactgtcttgaggcctcgctgtgtgagcgccgagcactccaggtattttacagcaccaatctccttagccatggctagaccctgcggataggtgatgggagtcagcttcttctccttcagtttctcgatcgtgtctttatcatccctaagatcaagtttagttcccact

SEQ ID NO: 185 - DNA, 315 bp, Homo sapiens
  misc_feature: n=a,t,g or c
ttttttttttgaccccaagcacagctttattgacaccccagccaacaccaacactctttccaaccagcggtgaggggcccatgggngttngcctngaaggtggattgagggcctcggttttttgttgagtgatgacagctccatgttccttccagttggccctgcagcccctctatcccccagctttagccgctactcccagtggggcaggaggagcttccatttgccatctggagaccctggcagggacttgcccatccgatccanacaccagcaggggacctcgggcgctgcccctggggatganggggcant

SEQ ID NO: 186 - DNA, 280 bp, Homo sapiens
  misc_feature: n=a,t,g or c
accacacaagtttatttaaataaaagtgaacacatatgcaggctggtgcccgaggggcagggggtggggagggcaggtgggaagcagacagacaatggggtccaggcagagtttgtntggtgaaccaggctgctggagggagtggctgggggcctcagggcagcgctgggattcantgctngggcagggggccttnggtgggtgagcctggtgccaggaggtcatttccatccctcacatgcccccctccctttccctgaccccctgggcctacagcact

SEQ ID NO: 187 - DNA, 327 bp, Homo sapiens
  misc_feature: n=a,t,g or c
aatgattaatagatgatttatttaggcaggaatacatatagtcatcattgccagacttaatatgagaggtgaaatgttcgatccaatttcccttcctggataagtttttctttcctatcctgtaaagacagaaaaaaagtacattaaagacaatatattctgccagtnggctatattagataaaaataaataaataaaaaaggtaagaaaaactgcattttggcacaacccaccatacaactgacaaacagaatgaaacactccaaacctaattgcaatcccactgtctaaagcccagggagtgtgcgaagaaacagtaatccgagg

SEQ ID NO: 188 - DNA, 323 bp, Homo sapiens
  misc_feature: n=a,t,g or c
catggcaatcttttattacttatttttnatttcattccatgttggaagcaaagtcatatctattaaaaagtaaaaccacaaattagtctttgattattcagangcataagangattgctgttttcatgttttccatttttccctccagtggcttgaaaagtacagatgctcttttcagtcatgttttgtcttaaagattttaaaataggaggagtctgcatccacaccactcttaaagttctcaatccttttcttccccatcttgttgggntatccaccgggnccgggntgggcatgtattgccacaaatatggttactanca

SEQ ID NO: 189 - DNA, 329 bp, Homo sapiens
agtaaacaacctagtcttttatttgcccaaggccggctgttgcaagcactgaggccccaagacttccagaagggaaggggaggaggggcaaacactgtgcctaccaggtgctgcctgccccgtcctgcttcctgcaggaggtgggaagggagagaaaacggacattcgcgccatcaagtatctccccagttttcagccactatattcagttgtggaggaggaaactgaggcacacgcatccccccaggcttctacttgctagtccaaggtttaacttactccctcccctcatctctacccccagcagaatgagctgtaagcagcctggg

SEQ ID NO: 190 - DNA, 468 bp, Homo sapiens
  misc_feature: n=a,t,g or c
tttaggggtctggctttctctttagttctcatcacactagggctctcagtcacagagaaggcacttaaatgggaaggccacctgatgcaggccaaccatattcaccccccgcccacccgctctgggggaggggagcacaacgacatcaccacttgacatcccccttggcactggtatgtgggtccccttaaccgttagaccctggggagagcccaaggccttgacctccggaatcgccatgttaggaggaggggcttcagaaacagttggaaggcaggatatcctgggagctgcccccagccagcaggggatcaggcagggggctgtaggagatgggttggcacaggggaaggggacagcttggtcgggctttcctgggagattccccaaaccccacagaaggtcccacctcctacagattccccaaaaggcaccggttaaaggatgggcaaagaggcacttgattnt

SEQ ID NO: 191 - DNA, 390 bp, Homo sapiens
gcaaaataagcgtgttataaaatttatttgtgtaagcattcagacatttttaggtgggaaagatgatatgcagaatccactacaaggtgcaacagaaaatcgtattggaaaggacggtacatctggcgcagaccagcagtggcacgattccaaacaaatgtcagacgagagcgcttcatggggagaaactgaaaattataatttaaagcttcatgaggcaagatatgttccaatttaaaacactaagaaatagtaccatcgatgaaaaaggaaatcaacctccaggtgtaccaaaaggggcgtagggcaaacggggaaaatttgcatttgttgaggtacaaataaggagtgttctgtaagagaggggcattaattattaatgacaaaccc

SEQ ID NO: 192 - DNA, 381 bp, Homo sapiens
  misc_feature: n=a,t,g or c
ttttattaaaaaaaaaaaaacccacattttttttnattggnnagtnttggaaggantttntnanaaangtnagcccatgggcctttggantttnaggggagtgggtccgntccaccagatgccagcaccggggccagtgcagctcagagccctgtggcgnactacagggcctgcacagacggtcactcaaagaaagatgtccctgtgccctactccttggcgatggcaaagggcttctccacctcgatcttgccgcagtctgcgatgatcanatccttnaggggtttatcccgggctgtctgtcttgggtgctctccaccttccgnaccacctccatgccctctagaactttgccaaacaccacatgcttgccatttaggc

SEQ ID NO: 193 - DNA, 375 bp, Homo sapiens
  misc_feature: n=a,t,g or c
tcgcattcaacttaaatgnttaacatngacaatgtcttggaacaataagcaaacaatgcttaaatttttcattcaaattcactttccacatgtcaaaagacctcaaggtagaaaaaaataaaataaaaatataaatatctgagaatccatcttaataaataaattaaaaacncnnnccaacgttttcacnnccccntgttaatgtcagaacattcagaccacctcaacaatgcatgatcagtaacattacaatgaacattgatgttgaagaaaaactacagtacatggatatagctatttatttctatctaccagaaaataaagtcgtatcttttcttagtataatattggtcatttctaatcagaacacactat

SEQ ID NO: 194 - DNA, 219 bp, Homo sapiens
  misc_feature: n=a,t,g or c
acaaataaacggggcttttattgtgtgtccacaaaaacaaagtcagggtggcctttggttaatcccctccccccaacaagatgacaaaaggaggaatgcatgtcaacaaaatgacaaagaggaccatggaggggcctgagtnnnnntgcctccctggtgggacaaggcaggggagcaagcactactcttgggcttagggccagcggccccccaagcaaa

SEQ ID NO: 195 - DNA, 99 bp, Homo sapiens
aatgcaggaagcatttattgagggccagagctgcattctacaagaggcaagaggcaggacacaggcaatctctagtgggttagaggagaggttggggag

SEQ ID NO: 196 - DNA, 269 bp, Homo sapiens
cccagggcagtggtgggtgctttatttccatgctgggtgcctgggaagtatgtagacggggtacgtgccaagcatcctcgtgcaaccggagagcccggggaggggctctgcggccgtcgcactcatttacccggggacaggagaggctcttctcgtgtagtggttgtgcagaccttatgcatcacgggcatgagaagacgttcccctgctgccacctgctcttgtccacggtgagcttgctatagaggaagaaggagccgtcggagtcc

SEQ ID NO: 197 - DNA, 630 bp, Homo sapiens
gcaggaggcgccatcatgggagtggacatccgccataacaaggaccgaaaggttcggcgcaaggagcccaagagccaggatatctacctgaggctgttggtcaagttatacaggtttctggccagaagaaccaactccacattcaaccaggttgtgttgaagaggttgtttatgagtcgcaccaaccggccgcctctgtccctttcccggatgatccggaagatgaagcttcctggccgggaaaacaagacggccgtggttgtggggaccataactgatgatgtgcgggttcaggaggtacccaaactgaaggtatgtgcactgcgcgtgaccagccgggcccgcagccgcatcctcagggcagggggcaagatcctcactttcgaccagctggccctggactcccctaagggctgtggcactgtcctgctctccggtcctcgcaagggccgagaggtgtaccggcatttcggcaaggccccaggaaccccgcacagccacaccaaaccctacgtccgctccaagggccggaagttcgagcgtgccagaggccgacgggccagccgaggctacaaaaactaaccctggatcctactctcttattaaaaagatttttgctgacaaaaaaaa

SEQ ID NO: 198 - DNA, 233 bp, Homo sapiens
cagccatggctcgtggtcccaagaagcatctgaagcgggtggcagctccaaagcattggatgctggataaattgaccggtgtgtttgctcctcgtccatccaccggtccccacaagttgagagagtgtctccccctcatcattttcctgaggaacagacttaagtatgccctggacaggagatgaagtaaagaagatttgcatgcagcggttcattaaaatcgatggcaaggt

SEQ ID NO: 199 - DNA, 412 bp, Homo sapiens
  misc_feature: n=a,t,g or c
caggtttattttcacattgtttaattttatgtacatttcacatatcataaatacacacaatacaaaaagctatacaaaaaccctactaattcaacatttaaaaaagggagagggagatactgcatttgatttctgacacttttctgtttaaataatacttaaattcagttttcaagaagacaacaaattgaaaatcattaatttttcagagggctttgtgttcacataaattcatcattcaggctgggcatggtggctcacacctgtaatcccagcaagttgggaggctgaggcaggtggatcacctgaggtcaggagttcgagaccagcctgggccaacatggcaaaaccccatctctaaataaaaacaaaacaaaacntaagatagattcatcattccaggtatattttt

SEQ ID NO: 200 - DNA, 407 bp, Homo sapiens
  misc_feature: n=a,t,g or c
aattttaattttatttttttacaatgtaccatgaacatcttttccatgcacatgggtgaaaatcctctactaaaatatagagcgccgtagttgggtcaaaaggctgctggtaacgagactgacatctaaagcaaagtatcagcttaaggttaaagcattgggcctggcaaatacctaccagggaaagcagggccagcantattctcatcagagaantcagattgganggccaaagnnttaaaggtatgggttatcgtgtaagcccctctggcccctacctccacccctcactcccctgacaccccgttgtccccttggggcgnattggttcctgtacatctctttgccatccnatganaaccacccnttttctgtttttnccttagctcctcttgagcccttgncac

SEQ ID NO: 201 - DNA, 405 bp, Homo sapiens
  misc_feature: n=a,t,g or c
acaagtctttaattaaaaaactcaacaaaaatatataattgagcattttacataatgcatacattcttaatatctgcaggtaagataaacaacagaaggcaaaagcagatatgctgtattgcttctttggcaactcaccaatatcatcccctgcagaaacagagtttttttttttttttttaaatccatggtcttaaaataattgtcccttagtataaacaaaatatttagcaataatacagtagacggattcttcaaattcacaacaatttataatactttataccacaagggtaaactagtaagctgctttctaaaattaaggcagcagcagtgtttagagggggagtaaaaaaaaaaaaaaagncatcccttttcnagttatatcctggctctgccttcttt

SEQ ID NO: 202 - DNA, 350 bp, Homo sapiens
  misc_feature: n=a,t,g or c
nccttacccttgtctccacccctttgtaattttatttatgtatttntttgaagacagggttcactctgtcccctaggctggagtgcagtgacacaaacacagctcactgcagcctcaacttcctgagctcaaacgatctttctaccttagccttccacctcggcctcccaagtagttgggaccacaggttcacgccaccatgtccagctaattattttgttgttgtatttttttataggagagggaaggtctcactntgttgcccggggtaggtctcaaactccgggggctcaaggtggatccccccatccccaccacccaaaggtgctggggaataggatacattttaa

SEQ ID NO: 203 - DNA, 530 bp, Homo sapiens
cgctctcctttcgttgcctgatcgccgccatcatgggtcgcatgcatgctcccgggaagggcctgtcccagtcggctttaccctatcgacgcagcgtccccacttggttgaagttgacatctgacgacgtgaaggagcagatttacaaactggccaagaagggccttactccttcacagatcggtgtaatcctgagagattcacatggtgttgcacaagtacgttttgtgacaggcaataaaattttaagaattcttaagtctaagggacttgctcctgatcttcctgaagatctctaccatttaattaagaaagcagttgctgttcgaaagcatcttgagaggaacagaaaggataaggatgctaaattccgtctgattctaatagagagccggattcaccgtttggctcgatattataagaccaagcgagtcctccctcccaattggaaatatgaatcatctacagcctctgccctggtcgcataaatttgtctgtgtactcaagcaataaaatgattgtttaacgta

SEQ ID NO: 204 - DNA, 158 bp, Homo sapiens
  misc_feature: n=a,t,g or c
aaaattttaaatctttaatttccgttttcacgtattttcttcttgcttccaaaaggaaaggagtgcgtactctcgttgcctgtacatcgtccacagcccctgggtcgggncngcggtccctgggccgcccggggggtccacatgcagcccctgggtgg

SEQ ID NO: 205 - DNA, 2252 bp, Homo sapiens
aattcggcttcgacgttggccctgtctgcttcctgtaaactccctccatcccaacctggctccctcccacccaaccaactttccccccaacccggaaacagacaagcaacccaaactgaacccccccaaaagccaaaaaatgggagacaatttcacatggactttggaaaatatttttttcctttgcattcatctctcaaacttagtttttatctttgaccaaccgaacatgaccaaaaaccaaaagtgcattcaaccttaccaaaaaaaaaaaaaaaaaaaaaagaataaataaataagtttttaaaaaaggaagcttggtccacttgcttgaagacccatgcgggggtaagtccctttctgcccgttgggttatgaaaccccaatgctgccctttctgctcctttctccacaccccccttggcctcccctccactccttcccaaatctgtctccccagaagacacaggaaacaatgtattgtctgcccagcaatcaaaggcaatgctcaaacacccaagtggcccccaccctcagcccgctcctgcccgcccagcacccccaggccctggggacctggggttctcagactgccaaagaagccttgccatctggcgctcccatggctcttgcaacatctccccttcgtttttgagggggtcatgccgggggagccaccagcccctcactgggttcggaggagagtcaggaagggccacgacaaagcagaaacatcggatttggggaacgcgtgtcatcccttgtgccgcaggctgggcgggagagactgttctgttctgttccttgtgtaactgtgttgctgaaagactacctcgttcttgtcttgatgtgtcaccggggcaactgcctgggggcggggatgggggcagggtggaagcggctccccatttttataccaaaggtgctacatctatgtgatgggtggggtggggagggaatcactggtgctatagaaattgagatgcccccccaggccagcaaatgttcctttttgttcaaagtctatttttattccttgatattttttctttctttttttttttttttgtggatggggacttgtgaatttttctaaaggtgctatttaacatgggaggagagcgtgtgcgctccagcccagcccgctgctcactttccaccctctctccacctgcctctggcttctcaggcctctgctctccgacctctctcctctgaaaccctcctccacagctgcagcccatcctcccggctccctcctagtctgtcctgcgtcctctgtccccgggtttcagagacaacttcccaaagcacaaagcagtttttccctaggggtgggaggaagcaaaagactctgtacctattttgtatgtgtataataatttgagatgtttttaattattttgattgctggaataaagcatgtggaaatgacccaaacataatccgcagtggcctcctaatttccttctttggagttgggggaggggtagacatggggaaggggccttggggtgatgggcttgccttccattcctgccctttccctccccactattctcttctagatccctccataaccccactcccctttctctcacccttcttataccgcaaacctttctacttcctctttcattttctattcttgcaatttccttgcaccttttccaaatcctcttctcccctgcaataccatacaggcaatccacgtgcacaacacacacacacactcttcacatctggggttgtccaaacctcatacccactccccttcaagcccatccactctccaccccctggatgccctgcacttggtggcggtgggatgctcatggatactgggagggtgaggggagtggaacccgtgaggaggacctgggggcctctccttgaactgacatgaagggtcatctggcctctgctcccttctcacccacgctgacctcctgccgaaggagcaacgcaacaggagaggggtctgctgagcctggcgagggtctgggagggaccaggaggaaggcgtgctccctgctcgctgtcctggccctgggggagtgagggagacagacacctgggagagctgtggggaaggcactcgcaccgtgctcttgggaaggaaggagacctggccctgctcaccacggactgggtgcctcgacctcctgaatccccagaacacaacccccctgggctggggtggtctggggaaccatcgtgcccccgcctcccgcctactcctttttaagctt

SEQ ID NO: 206 - DNA, 427 bp, Homo sapiens
  misc_feature: n=a,t,g or c
ttttttgcggttctgcaaactttttttaattttaattttatttttttacaatgtaccatgaacatcttttccatgcacatgggtgaaaatcctctactaaaatatagagcgccgtagttgggtcaaaaggctgctggtaacgagactgacatctaaagcaaagtatcagcttaaggttaaagcattgggcctggcaaatacctaccagggaaagcagggccagcaatattctcatcagagaaatcagaatggaaggccaaaggatttaaaggtatgggatatcgtgtaagcccctctggcccctacctncacccctcactcccctgacaccccgttgtccccttggggcgaaatggatcctgtacatctctttgcatcccaatgaaaaccacccattttctgtttttttcccttaagctcctcttga

SEQ ID NO: 207 - DNA, 612 bp, Homo sapiens
ggaggccaaggtgcaacttccttcggtcgtcccgaatccgggttcatccgacaccagccgcctccaccatgccgccgaagttcgaccccaacgagatcaaagtcgtatacctgaggtgcaccggaggtgaagtcggtgccacttctgccctggcccccaagatcggccccctgggtctgtctccaaaaaaagttggtgatgacattgccaaggcaacgggtgactggaagggcctgaggattacagtgaaactgaccattcagaacagacaggcccagattgaggtggtgccttctgcctctgccctgatcatcaaagccctcaaggaaccaccaagagacagaaagaaacagaaaaacattaaacacagtgggaatatcacttttgatgagattgtcaacattgctcgacagatgcggcaccgatccttagccagagaactctctggaaccattaaagagatcctggggactgcccagtcagtgggctgtaatgttgatggccgccatcctcatgacatcatcgatgacatcaacagtggtgctgtggaatgcccagccagttaagcacaaaggaaaacatttcaataaaggatcatttgacaactggtga

SEQ ID NO: 208 - DNA, 311 bp, Homo sapiens
tttttttttttttggctatcaaattccaaagaagccccattttattacagagaaaatacaaagccgtttcctcacagggaaaagtacagtttcccttctccagggtgacagatgagccttttccgaagttctcagctttctcttctatcgaaacttcccatgtcggttaaagtgtttgtagagatagcggatggctttattaaggttgtgcaggtcatcagcgaacattctacttccaaccattttcctctttcggatacaacgttgcaattcattccctttccaacctcgaagccatatgggccccctga

SEQ ID NO: 209 - DNA, 425 bp, Homo sapiens
tgggggtttttaaggtgccgcatgttctttttagtttccatacatcgtctgtcccagagtgaggagaagttgatctccttcccacatccaccggaggctgcgtgagggaagcctggctccccacaacttgctccttctccagccctgcccctctcaattaaaacaatgctttcttttttcttttcttttttttgagacggagtcttgctctgtcacccgggctggagtgcagtggcgcgatcttggctcactgcaagctccgcctcctgggttcacaccattctccagcctcagcctcccaagctgctgggactacaggcgcccaccaccacgccaagctaattttttgtatttttttagtagagacagggtttcactgtgttagccaggatggtctcaatctcccaaccttgtgatccacccac

SEQ ID NO: 210 - DNA, 214 bp, Homo sapiens
ttttgctttttaatacaacatttatttatttaattgttttgagatggaggtcttgtcatgttacccaggctggacttgaacttctgggctgaacctcctgagtagctgggactacagatgcgtaccaccacacccggcccggcatgatataaacacttaaacaaaaattttaataaggattagtttttgttcatagggagaagggcccatgagg

SEQ ID NO: 211 - DNA, 7530 bp, Homo sapiens
cacgcctgtagttcagctactcagaaggctaggcagaactacttgaacccagagtggaggttgcagtgagccaagatcgcaccattgcactccaccctgggcaacagagtgagaccctgtctcaaaaaaaaaaaaaaattaaaaataggtaaattccattttcaaagatacctgtaaagatttttaaaatcattcatgaatgcggtctgttcgttgcacagagtagatgctcaaaaatggtgaatgagaccctctattttggtctcatgctgaagaagtccataaagcccacaagtcattttcatgatggacagaaaaatgtgtgtgctttctctgtctactgcctcaactgcacagaccccgggactgtagcagaaccatcttttgagcttgacaccgggaggcccaaattctagcacgggacctagggccagttgctctctggtcctcagtctcctcacccataaaatgggaaggagagaaccctgaatcattgcttctagcttctgaactcagttgttcagaacaaggactcactgctgatttttcaacagcacagggaattgcactgttcctggaatgatggacagtaccctctgttccactgggcaagtgagatttcccaggcctctctgttcccttctccccttagagagcaacagacgtgtggccccaccacctccctcaaccctctctctcctccctcaggactgggcacctcgctgcccccgctgctgcccactctgcgactgtgcctgtacgtgccagctccccgactgccgagacctcaactgtctctgcttcgagatcaagctccataggacccaggcccctgcctctggggagcggccagcccccaggcccatgtgccctcctccctgaagagcctttccccacgccactggaaccacagatggcctgccgagcacccaggcctgggaactggaatggcagcgcagggcctggctcctgcagggcaggactcttggccggctggacggcagctcctctggagggccagaaaagagagggctagtgctcggcagtgccctgcttcccttcccctccacacgtcaacgattctatttgaagttgggcagggggtggcgctgctcaccacacacaagtgttataggaggagtctggccccgtagtaccgggtacgcaggggtgcctcaaccacactccgtccacggactctccgttattttaggaggtagatgtagtgccagtatctactctccttcttaaaaaaaaccagggctccagagaatcagaacagccaccatcaccgcagggagtcaagggaggagggagattagagaaggagccagggagggtggcagggaggccacgtgatccgagtcccctcacccctttccttcccacaggtccctggccaaagatttatttctcttgacaaccaagggcctccgtctggatttccaaggaagaatttcctctgaagcaccggtgagtgggcaggggctctttgtccccaatcaatcagggccgacccaagtcttcctcccccttccccatgccgggccccacgatagtgtgaatgtcaggggcttcaggtttccctaaatataggtccctgccagaggatccgtggcgggaaaagggcaggggtcattagagaagatcggggacacatgtggggctgggcaggagctgccttataaccacccgggaacccctagctcactcgctgctgaccaggctctgccggctccttgccctcgccgcaggtgggccccttgcaggaccggccgggtgggatgggttggaattgggccaacaggtccagatgggtccaggtaggaggggagatttggacgataggagcagggggctcagcatctgggaggcagatcagttcggggacggattttcttttggagaaggaagtcaggctcaaggaagacgtttggcaggaactgtgaccccgcatgccagaggccgagcagcggccgtgcatagccgcgcattctggttttctgtggcgcagaggactaccagcctggctgcggcggcccggcggagaccgccaccatgcgcgacccagcccgcctgccagcctggaactcggatggggaggtctgcctccgcgcgccgctagtttccgaccgccttctcgctcccctgctgtcctctcgatgccctttcctccgcctcccttgacgcctgggccagtgacaggtgtcgtccgcgccgattcagcccgcgggcgaggcagctaacgcacgactgcgcgatgtggcccctatggtgacacgctgcagccgcgaagaccggaagctggggccccgggccgcgcgcgctgggcctgggaggcgaaactcagcttccttcgtttccgacttttccatccgcgtcctccacttccccgttccgccctcccccattgccaacattctggctgagatcagcgcccagagcgcgccaggctgggggaaaggagcagaagggagggccctagcgacccgcgggatgtggtccgagtcacgtccgagggggtggggagggatcgtgttctcgcgcccgccccttcctagcgcggcctctggctcgcctctcgggggcggcccgtagcccagtccgtcgcctgccattggacgccgcccgctcctcgtaaaggaaaaagctcggcggagggcggagtggtgcctttaaaaggccggcgccgccttccgcctgcaccgcctcctgcgccgccccttccgaggctaaatcgcttcctctcggaacgcgccgcagaaggggtcctggtgacgagtcccgcgttctctccttgaatccactcgccagcccgccgccctctgccgccgcaccctgcacacccgcccctctcctgtgccaggtgagcgcccctcttgcggggacccagggaccgtggagagggtcttgggggcagtggcgggttggcgtccgcgtggaggcctcccccattcgcgcccatgccagcgtctccccactaccaggcacacacaggctccccggcccctccagcctgaggtcctctaactgcgcaatgcagctgcgcgcgctgagtcatggcggggaggaagccggacgagatgaaggaccattctcccccttttcttgcagggacccctgtggcaaaggattagggccccttaccgctggcgtggatcctaagaggcagtgaggggtgggggccggcccatgtacagccccagggttctcgcaagtgggagcttggtttctgtcctgggaaacgggcgcccttcgcgaggagggaaacccctcgcgtgcttgatgcccccttaacactttccctgtctctccttatcgggcgaccattgattctgagcccggaacagctgcagccatgcgaagcgacgggagcatttttcaggggaaggcgcttgctcctccacgttcttgccccgtaggaacagtgacgatggcaaagcttaccgctttcctgcctgggctagggctagttccgccgccctttcctgggcttctccttgctctcttatatttttcctaatgcccctttcctaccacccgccccctccttgtggggaaaagcctgaccttgggatgtccttgaagccttggagcccgggccagccctgggatcttgaggggattggaaggaacacccagtggcagtcagaagagctgggttctaacctcagatctggctccggggttgctgtgtggcttgaagcacagacctttcccatatctgggccctttcccacgagggtgttgggccctctgcttgattcacgatctttacattctaaaatactccggttcggttttgttttcaggcaaggtgaccccatggcaaggcgcaagccagaagggtccagcttcaacatgacccacctgtccatgctatggccttttcctttcccccagttgccagtgggcaactccaccctcagctgggcaacacccagcaccagacagagttaggaaaggtaccggggcaggcctagcaaagggaagttgggcgtaagagagagctggggaccagaagtgccccagggcctgctgggtgtggggcaggggaggtagggaacatttccctgacctccaggagaggggccctggtcatcgggagatgatgggaaaccctagctaactagtccttcccctctgtttcctgtatccaggaacttgctactaccagcaccatgccctaccaatatccagcactgaccccggagcagaagaaggaactgtctgacatcgctcaccgcatcgtggcacctggcaagggcatcctggctgcagatgagtccactggtcgcgggcaggagacagaatgggtggagggtgcagggttgggagtggcaggctgatcccctaattcccatgtgacactcccagggagcattgccaagcggctgcagtccattggcaccgagaacaccgaggagaaccggcgcttctaccgccagctgctgctgacagctgacgaccgcgtgaaccccggcattgggggtgtcatcctcttccatgagacactctaccagaaggcggatgatgggcgtcccttcccccaagttatcaaatccaagggcggtgttgtgggcatcaaggtaaggggagggcctccggacgtgaggtttgagtaggaagtggaggaaggaaatccaggttagtgaggcagggaatgaatgctggattggtggcctagagacttgcatggagcctgcttcaggcttagggcatttactcgacattttttatcctcacaattctgagagaacagtatcattcccactttacacatgaaaatctcagaagctcagggaagtgaagtgttttgctcagagtaagtggcagagcccagtctgacacccaattcactcaacatttctgttgtcaataacatcccagtgtatcctgtctcagaggattgttactaagtgaactaagtgaaaatattttaatttaattgtaactaagtatttgagtaactaaacattttaagtaaatttttattttttttttttttgagatggagtctcgctgtctcccaggctggagtgcagtggtgcgatctcttggctcactgcaagttccgcctcccaggttcacgccattctcctgcctcagcctcccgagtagctgggactacaggcgcccgccaccacccggctaattttttttgtatttttagtagacactgggtttcaccatgttagccaggatggtctcgatctcctgatctcgtgatctgcccacctcggcctccctaagtgctgggattacaggcgtgcagccatgcccggcttaagtaactaaatattttaattgtaactaagtgaaaatatttgccagccctgaagatgcagtttaagggattaacgtaaaatagtgggggaagactggggctaaagaagaggaaagaggggcacgccagctacctaggaggctgaggcgggaggatcacttgagtccaggaaggggaggcttcaggtgagctgagattccaccactgtactccagccgaggcgaaagtggaaagggtgctagaggtcatttcctgtgtcttaatgttgttaccctgaccccaacaggtagacaagggcgtggtccccctggcagggacaaatggcgagactaccacccaaggtgagaactgtttgattctctgccctacgaacccaaccagagcaggtttgggtgctgggaggagtggaaaccacatgcccctcccaccctgctctgaccttcctcttctcttagggttggatgggctgtctgagcgctgtgcccagtacaagaaggacggagctgacttcgccaagtggcgttgtgtgctgaagattggggaacacaccccctcagccctcgccatcatggaaaatgccaatgttctggcccgttatgccagtatctgccagcaggtggcctgcaggtcctcaataggcaacctcctacctcatttggttccagtgttgttaatttgcctattaactgccatgatgcctacctccccaaaagcaagcattagctttggcgcgtggaggcactcaagggctgttgaaggcagaggggccaaggagggatggtgggtggatctgaggcggctcttgtctcctgtaatctagggctttgaagcctgagtccctggcatcatcaagatacggtcttgaccagtggctgtggagagatgtaggtgggactctgggttaggaggcctcacagtgaccctgtccctcgccctgcagaatggcattgtgcccatcgtggagcctgagatcctccctgatggggcccatgacttgaagcgctgccagtatgtgaccgagaaggtaaatggctacctgcctgaccagtgcaaggtggctggccggggaccctggggctaacccctatcctctcctccaccccactacccaccgtgcgcctgctctgctcaggtgctggctgctgtctacaaggctctgagtgaccaccacatctacctggaaggcaccttgctgaatcccaacatggtcaccccaggccatgcttgcactcagaagttttcacatgaggagattgccatggcgaccgtcacagcgctgcgccgcacagtgccccccgctgtcactggtgaggcccactcatcttgatctctatgcagtagataagctccacccacaaccctatgcccatttggacggatttcccatggcaacttccaccagctcctgccagcttcctgggtctctgacacagccccctctgctaccccctgcactacagggatcaccttcctgtctggaggccagagtgaggaggagtcgtccatcaacctcaatgccattaacaagtgccccctgctgaagccctgggccctgaccttctcctacggccgagccctgcaggcctctgccctgaaggcctggggcgggaagaaggagaacctgaaggctgcgcaggaggagtatgtcaagcgagccctggtaaggataggcaggaggtgggcagggtgcctgggtggatgggactcggggaagagcccttctcactccacccctctccctgcttaggccaacagccttgcctgtcaaggaaagtacactccgagcggtcaggctggggctgctgccagcgagtccctcttcgtctctaaccacgcctattaagcggaggtgttcccaggctgcccccaacactccaggccctgccccctcccactcttgaagaggaggccgcctcctggggctccaggctggcttgccgcgctctttcttccctcgtgacagtgttgtgtggtgtcgtctgtgaatgctaagtccatcaccctttccgggacactgccaaataaacagctatttaagggggagtcggccgtccgtgtcttgtggtgtctaatgcaggggagggcctggggaggtagcagagcccagaagaagaaagagcccctgttctctgttttttctgggcagaaaaggagtgaaaggtggaaggaccttcctgctctgttttatacttggccagggcttcaagaaaggctgagagctgtgacattttcttcactgcagg

SEQ ID NO: 212 - DNA, 411 bp, Homo sapiens
acagaggttcagctattattgaaacttgtaatttctaaacttaaattggggcaagtggctagagtgcagagtaatgccatcactgcccactgggaatgcagaccgaataattaatagccacccctcagacggaggaccaggtgcagggtcgactctttctggatgttgtaatcagagagagtgcggccatcttctagctgcttgccggcaaagatcagcctctgctggtcaggggggatgccctctttatcctggatcttggccttcacattctcgatggtgtcactgggctccacctccaaggtgatggtcttgccggtcagggtcttcacgaagatctgcatgccacctctcaggcgaaggaccaggtgcagggttgactccttctggatgttgtaatcagagagggtg

SEQ ID NO: 213 - DNA, 1116 bp, Homo sapiens
ctgcaggtccagcacgccagcaagcagatcgccgccgacaagcagtacaagggcatcgtggactgcattgtccgcatccccaaggagcagggcgtgctgtccttctggaggggcaaccttgccaacgtcattcgctacttccccactcaagccctcaacttcgccttcaaggataagtacaagcagatcttcctggggggcgtggacagacacgcgttctggaggtactttgcgggcaacctggcctccggcggtgcggccggcgcgacctccctctgcttcgtgtacccgctggattttgccagaacccgcctggcagcggacgtgggaaagtcaggcacagagcgcgagttccgaggcctgggagactgcctggtgaagatcaccaagtccgacggcatccggggcctgtaccagggcttcagtgtctccgtgcagggcatcatcatctaccgggcggcctacttcggcgtgtacgatacggccaagggcatgctccccgaccccaagaacacgcacatcgtggtgagctggatgatcgcgcagaccgtgacggccgtggccggcgtggtgtcctaccccttcgacacggtgcggcggcgcatgatgatgcagtccgggcgcaaaggagctgacatcatgtacacgggcaccgtcgactgttggaggaagatcttcagagatgaggggggcaaggccttcttcaagggtgcgtggtccaacgtcctgcggggcatggggggcgccttcgtgctggtcctgtacgacgagctcaagaaggtgatctaagggccgcggcctcctccacacacacacacacaccaggggaaccaagagaaccacgtagaatcctcaaccgtgcggaccatcaaccttcgagaaattccagttgtctttttcccagccgcatcctgcctgtagatggccggggaaggctctagaaaaggggcgcattgcgatccaaccatcggcagccgattccgtgtcttgatcacggggtgggagggaaccgtggcgtccctgcgtggggcccatgggtgagacactccagtactgagacctagagtccagatgcttgtaggagccaagtcgtgttctaagtatttatttaaaaca

SEQ ID NO: 214 - DNA, 1093 bp, Homo sapiens
ctgcaaggcggcggcaggagaggttgtggtgctagtttctctaagccatccagtgccatcctcgtcgctgcagcgacaccgctctcgccgccgccatgactgagcagatgacccttcgtggcaccctcaagggccacaacggctgggtaacccagatcgctactaccccgcagttcccggacatgatcctctccgcctctcgagataagaccatcatcatgtggaaactgaccagggatgagaccaactatggaattccacagcgtgctctgcggggtcactcccactttgttagtgatgtggttatctcctcagatggccagtttgccctctcaggctcctgggatggaaccctgcgcctctgggatctcacaacgggcaccaccacgaggcgatttgtgggccataccaaggatgtgctgagtgtggccttctcctctgacaaccggcagattgtctctggatctcgagataaaaccatcaagctatggaataccctgggtgtgtgcaaatacactgtccaggatgagagccactcagagtgggtgtcttgtgtccgcttctcgcccaacagcagcaaccctatcatcgtctcctgtggctgggacaagctggtcaaggtatggaacctggctaactgcaagctgaagaccaaccacattggccacacaggctatctgaacacggtgactgtctctccagatggatccctctgtgcttctggaggcaaggatggccaggccatgttatgggatctcaacgaaggcaaacacctttacacgctagatggtggggacatcatcaacgccctgtgcttcagccctaaccgctactggctgtgtgctgccacaggccccagcatcaagatctgggatttagagggaaagatcattgtagatgaactgaagcaagaagttatcagtaccagcagcaaggcagaaccaccccagtgcacttccctggcctggtctgctgatggccagactctgtttgctggctacacggacaacctggtgcgagtgtggcaggtgaccattggcacacgctagaagtttatggcagagctttacaaataaaaaaaaaatggcttttc

SEQ ID NO: 215 - DNA, 278 bp, Homo sapiens
gtggtctaaaataaacttttaattgcacatttgtgtcttgggttatctgtggggtgagaaacctcctcacttccaatcccagctatctgggtacaatctggtgttgtggtctggctgtcggcgaggggtagaggtgggtgcaggactggcccccgagtctgcaccgacctcttcagggcagggagctcagaccatggtagtacttgcactgcttcagggcctcgctgaagccctcacacagggacaggtcactctgagtggtggaacagtccaggaac

SEQ ID NO: 216 - DNA, 297 bp, Homo sapiens
  misc_feature: n=a,t,g or c
agggttcagttccagctgattttatttccttctcaaaaaaagttatttacagarggtatatatcaacaatctgacaggcagtgaacttgacatgdttagctggcatgatttnnncttttttntcccccaaamattgtttttgkggccttgaattttargrcaaatwttytacasggsatattgcacagggtgggtggcaaaaaaaagtttaaaaacaaaaacccttavsggrmcygccttaaaaaggvagacgkcctagkgccygtcatgttatattammcatacatacacacaatc

SEQ ID NO: 217 - DNA, 298 bp, Homo sapiens
  misc_feature: n=a,t,g or c
aaaatgacaaattctttatttaaatcaacaaactcatcttcctcaagccccagaccatggtaggcagccctccctctccatnnactcaccncaccccttagccacagtgaagggaatggaaaatgagaagccacgagggcccctgccaggaaaggctgccccagatgtgtggtgagcacagtcagtgcagcngtggctggggcagcagntgccacaggctcctccctataaattaagttcctgcagccanagctgtgggagaagcatacttgtngnagaaagggcagtccngcntcag

SEQ ID NO: 218 - DNA, 423 bp, Homo sapiens
catctttaatgaaatgactgtggaaataacatatatttccatgacaccagtactacagtcttcggagtcacagcaagatacacagaattacatccgtaattactatgaatgccaacatttcaggcagtaatttctgttacatggcaaacaagatcaagaacgcaaccatcaaacaaaagagacccatagcttcagacaaggcaaatcccaggatagcatatgagaacagctgctgattacactggtctgaaactcccttcggatcagctgacacacaccattctgggccccattaaaaactgtagagccctctccagtcctagtctctggcgagataacactgatgcagaaattggtctatatgcaactctggatccagctcggatcagagcgggggtgcgggcgagcttggcgcaggcgaaa

SEQ ID NO: 219 - DNA, 319 bp, Homo sapiens
ggagaatacctccctaagcccttaatgcggtcgagcttgctttgtgatgttggcatgggaggggagacctgggtggtgactgagttccctttatcaaacccttcaatgggcacaaaattgagtgcttgattttaggttttatttttttatgaatgtccaaatctgtgtttccccctgccctcccagactgtgtggccagttgaaagtgtctggtttgtgttcatctctccctcatttctggagcagggccatgagaccctcgcacatctcctatgctctgcatccacgcctcttttggacattaaaggttgattgatgc

SEQ ID NO: 220 - DNA, 265 bp, Homo sapiens
aatttgttcaattatttatttattgtggagtattttacatgcaagaacccaattagagagagggtatctggaaggagggccagtggggtggatggatgctctgagcctcgggtgcactgacccaccctccagaaccagctctgcccacagaaacacatgacagtgacaaaaacactaaacttctaggacgagtggacagcaaacgcgacattcaacacattcctcttttcagtagcccccaacaatcctgagaatcctcacaatt

SEQ ID NO: 221 - DNA, 428 bp, Homo sapiens
  misc_feature: n=a,t,g or c
gtgggagcacacagaccaggtcccaatcctggttctgcccctgactggctggtgactctgagcaagttgcttgacctctccaagcctccgtttcctcatgtgcaaagtgtggacaaaacagtaccttcctcataaggaacgtgcgacgcgcctcagaagtacgtgttcataaatggtagccattgttgttaccttcccgtctgtgaacatggatcacatcatctctgtgggtaacccagtcctcgttgtatgacttgtcaaaatgcagttccacttgtattaatattgaccctgttcatcgtcaccanggactgcatcttgcaccactgtgccgtcttctaggcacacacgaccccgttatctcccttggaaaaattcctctcactggaaatgtacaattaaaggatgattgaaatgtttaaaaaaaa

SEQ ID NO: 222 - DNA, 145 bp, Homo sapiens
ttgataatagttcattttattaaataatttataaagtcagaccagtgcattgggcttgttatgggaaaccattccttcctactgtcacatatcctttcatattatatcaggtgccaaaacattcccttttattcaatttattaat

SEQ ID NO: 223 - DNA, 446 bp, Homo sapiens
tttttttttaaactcagaaatggcaaatagatttaatgcagagtgtcaacttcaattgattgatagtggctgcctagagtgctgtgttgagtaggtttctgaggatgcaccctggcttgaagagaaagactggcaggattaacaatatctaaaatctcacttgtaggagaaaccacaggcaccagagctgccactggtgctggcaccagctccaccaaggccagcgaagagcccaaatgtgagagtggcggtcaggctggcaccagcactgaagccaccactggtgctggcactggcactggcactgttattggtactggtactggcaccagtgctggcactgccactctcttgggctttggctttagcttctgctcccgcctggatccgggctttggccagggtccgatatcagcttcgtcccagttgcagggcccggcagcatt

SEQ ID NO: 224 - DNA, 342 bp, Homo sapiens
ttgtggctgccgtgcgtgtctatttattgttgctgccaccctggaggagccccagtttcttctgtagctttcttttctgggggatcttcctggctctgcccctccattcccagcctctcactccccatcttgcacttttgctagggttggaggcgctttcctggtagcccctcagagactcagtcagcgggaataagtcctaggggtggggggtgtggcaagccggcctggatcctgtcctgggtcctccttcctccgcagtcccgtctctattgctgggtgtagtgtccatggtctggcctcatctccagctctgtctcagcgccgtgcccctcgcttctt

SEQ ID NO: 225 - DNA, 1746 bp, Homo sapiens
gagcctgacttcagcgctcccactctcggccgacacccctcatggccaaccgttacaccatggatctgactgccatctacgagagcctcctgtcgctgagccctgacgtgcccgtgccatccgaccatggagggactgagtccagcccaggctggggctcctcgggaccctggagcctgagcccctccgactccagcccgtctggggtcacctcccgcctgcctggccgctccaccagcctagtggagggccgcagctgtggctgggtgcccccaccccctggcttcgcaccgctggctccccgcctgggccctgagctgtcaccctcacccacttcgcccactgcaacctccaccaccccctcgcgctacaagactgagctatgtcggaccttctcagagagtgggcgctgccgctacggggccaagtgccagtttgcccatggcctgggcgagctgcgccaggccaatcgccaccccaaatacaagacggaactctgtcacaagttctacctccagggccgctgcccctacggctctcgctgccacttcatccacaaccctagcgaagacctggcggccccgggccaccctcctgtgcttcgccagagcatcagcttctccggcctgccctctggccgccggacctcaccaccaccaccaggcctggccggcccttccctgtcctccagctccttctcgccctccagctccccaccaccacctggggaccttccactgtcaccctctgccttctctgctgcccctggcacccccctggctcgaagagaccccaccccagtctgttgcccctcctgccgaagggccactcctatcagcgtctgggggcccttgggtggcctggttcggaccccctctgtacagtccctgggatccgaccctgatgaatatgccagcagcggcagcagcctggggggctctgactctcccgtcttcgaggcgggagtttttgcaccaccccagcccgtggcagccccccggcgactccccatcttcaatcgcatctctgtttctgagtgacaaagtgactgcccggtcagatcagctggatctcagcggggagccacgtctcttgcactgtggtctctgcatggaccccagggctgtggggacttgggggacagtaatcaagtaatccccttttccagaatgcattaacccactcccctgacctcacgctggggcaggtccccaagtgtgcaagctcagtattcatgatggtgggggatggagtgtcttccgaggttcttgggggaaaaaaaattgtagcatatttaagggaggcaatgaaccctctcccccacctcttccctgcccaaatctgtctcctagaatcttatgtgctgtgaataataggccttcactgcccctccagtttttatagacctgaggttccagtgtctcctggtaactggaacctctcctgagggggaatcctggtgctcaaattaccctccaaaagcaagtagccaaagccgttgccaaaccccacccataaatcaatgggccctttatttatgacgactttatttattctaatatgattttatagtatttatatatattgggtcgtctgcttcccttgtatttttcttcctttttttgtaatattgaaaacgacgatataattattataagtagactataatatatttagtaatatatattattaccttaaaagtctatttttgtgttttgggcatttttaaataaacaatctgagtgt

SEQ ID NO: 226 - DNA, 209 bp, Homo sapiens
  misc_feature: n=a,t,g or c
ttttttttttttttccccaaaggaatgctttattgacaaattacccattattataataactttaaggaaaagatacatcggtcaacacccgcacaacctgccttctcaccacaccccacaggccgnttttaaccctggncgaagggcaccgagcgntgggnttccctggcccctgcatntntgtcgtgtgtggagtgccatccccaagg

SEQ ID NO: 227 - DNA, 287 bp, Homo sapiens
  misc_feature: n=a,t,g or c
ggaagccagtattttatttctcttggctgcagagggccgctcttgcctaggcgtccacaggcgcgacgatggggctcgcggaggagtccgcagcagggcaccccacanccgggggaccggcctcggcgagaagggcacanagtggaagaccccaccaagcccggcgccacccagcagcgtggggactgcctgtccgccgtccatcccaccctccccgtcccacgacctcctcctggggctaatggnagnaacaggnagnaccccgccgaattgtccgtgcaattacc

SEQ ID NO: 228 - DNA, 891 bp, Homo sapiens
tttttttttctctctcctcccgccgcccaagatgccgaaaggaaagaaggccaagggaaagaaggtggctccggccccagctgtcgtgaagaagcaggaggctaagaaagtggtgaatcccctgtttgagaaaaggcctaagaattttggcattggacaggacatccagcccaaaagagacctcacccgctttgtgaaatggccccgctatatcaggttgcagcggcagagagccatcctctataagcggctgaaagtgcctcctgcgattaaccagttcacccaggccctggaccgccaaacagctactcagctgcttaagctggcccacaagtacagaccagagacaaagcaagagaagaagcagagactgttggcccgggccgagaagaaggctgctggcaaaggggacgtcccaacgaagagaccacctgtccttcgagcaggagttaacaccgtcaccaccttggtggagaacaagaaagctcagctggtggtgattgcacacgacgtggatcccatcgagctggttgtcttcttgcctgccctgtgtcgtaaaatgggggtcccttactgcattatcaagggaaaggcaagactgggacgtctagtccacaggaagacctgcaccactgtcgccttcacacaggtgaactcggaagacaaaggcgctttggctaagctggtggaagctatcaggaccaattacaatgacagatacgatgagatccgccgtcactggggtggcaatgtcctgggtcctaagtctgtggctcgtatcgccaagctcgaaaaggcaaaggctaaagaacttgccactaaactgggttaaatgtacactgttgagttttctgtacataaaaataattgaaataatacaaattttccttc

SEQ ID NO: 229 - DNA, 148 bp, Homo sapiens
tttttttttcttagatggggtcttgctgtgttgcccaggctacgctcaaattcttgggtttaagcaatcctccggcctcagcctctcaagtagctgggattgcaggctgcatccgcacccagctcctaacaattttttttccccctct

SEQ ID NO: 230 - DNA, 293 bp, Homo sapiens
tttttttttgcaggtgcatttgtttctttatttaaaaaaatcatctgggggcatggtctgaggaggagaccctcccatggctttggggaggacgcaggttccaggagtcacagggcagaaacacgcggggtgggtgggggcgtggcggagtggggaggggctgtgcacagcacctgggggtggctcccacggcaccaggtgggctagggcaacagtatgtacaggcgagcagtgctcctggacccggtcggggccggctggggcccaattctgcggcaggggagctctggggc

SEQ ID NO: 231 - DNA, 355 bp, Homo sapiens
atttttatattatttatttattcttccttagtttcttgagattatcatccgctgagggtggaaggggagtgagcagacacactcgggaggtgtcttgagattatcatccactgagggtggagctgagggtggaaggggagtgagcagacactcgggaggtgtcttgagattatcatccgctgagggtggaaggggatagagcagacactccgcaggtgtcttgagattatcatccgctgagggtagagctgagggtggaaggggagtgagcagacactcggaaggtgtcttgaggctcagggagttatcaattatagaatgttgttgagttggaggaggtggctggtggcccatc

SEQ ID NO: 232 - DNA, 438 bp, Homo sapiens
gctctccggtccgtgcctccaagatgacaaagaaaagaaggaacaatggtcgtgccaaaaagggccgcggccacgtgcagcctattcgctgcactaactgtgcccgatgcgtgcccaaggacaaggccattaagaaattcgtcattcgaaacatagtggaggccgcagcagtcagggacatttctgaagcgagcgtcttcgatgcctatgtgcttcccaagctgtatgtgaagctacattactgtgtgagttgtgcaattcacagcaaagtagtcaggaatcgatctcgtgaagcccgcaaggaccgaacacccccaccccgatttagacctgcgggtgctgccccagctcccccaccaaagcccatgtaaggagctgagttcttaaagactgaagacaggctattctctggagaaaaataaaatggaaattgtactt

SEQ ID NO: 233 - DNA, 603 bp, Homo sapiens
cgtgctgctacacaagaaccctgagactgacctgcaggacgaaaccatgaagagcctgatccttcttgccatcctggccgccttagcggtagtaactttgtgttatgaatcacatgaaagcatggaatcttatgaacttaatcccttcattaacaggagaaatgcaaataccttcatatcccctcagcagagatggagagctaaagtccaagagaggatccgagaacgctctaagcctgtccacgagctcaatagggaagcctgtgatgactacagactttgcgaacgctacgccatggtttatggatacaatgctgcctataatcgctacttcaggaagcgccgaggggccaaatgagactgagggaagaaaaaaaatctctttttttctggaggctggcacctgattttgtatccccctgtagcagcattactgaaatacataggcttatatacaatgcttctttcctgtatattctcttgtctggctgcacccctttttcccgcccccagattgataagtaatgaaagtgcactgcagtgagggtcaaaggagagtcaacatatgtgattgttccataataaacttctggtgtgatactt

SEQ ID NO: 234 - DNA, 325 bp, Homo sapiens
  misc_feature: n=a,t,g or c
ttttttttttgggtgtgaacacgcatttatttacacattgtcatcggtaggcacatacccagcccagcccgttgaagggacagatctcaggctgtcacccatggaacctgcagacccttccctcctccagaacccttgaaggcgaanctgaggagaaccaggnnttttaggcttctgttcaagagctaagaactaaattttatgccttcatctgatttctttccaaaaagtccatttcattaagtattcagacttcttagctccatcccattcatacttttngctctcctactacccacccaagattgttaataataacaataat

SEQ ID NO: 235 - DNA, 1271 bp, Homo sapiens
atgcgggtcatggcgccccgaaccgtcctcctgctgctctcgggagccctggccctgaccgagacctgggccggctcccactccatgaggtatttctacaccgccatgtcccggcccggccgcggggagccccgcttcatcgcagtgggctacgtggacgacacccagttcgtgaggttcgacagcgacgccgcgagtccgaggatggcgccccgggcgccatggatagagcaggaggggccggagtattgggaccgggagacacagatctccaagaccaacacacagacttaccgagagagcctgcggaacctgcgcggctactacaaccagagcgaggccgggtctcacaccctccagaggatgtaaggctgcgacgtggggccggacgggcgcctcctccgcgggcatgaccagtccgcctacgacggcaaggattacatcgccctgaacgaggacctgagctcctggaccgcggcggacacggcggctcagatcacccagcgcaagtgggaggcggcccgtgaggcggagcagtggagagcctacctggagggcctgtgcgtggagtggctccgcagatacctggagaacgggaaggagacgctgcagcgcgcggaccccccaaagacacatgtgacccaccaccccatctctgaccatgaggccaccctgaggtgctgggccctgggcttctaccctgcggagatcacactgacctggcagcgggatggcgaggaccaaactcaggacaccgagcttgtggagaccagaccagcaggagatagaaccttccagaagtgggcagctgtggtggtgccttctggagaagagcagagatacacatgccatgtacagcatgaggggctgccgaagcccctcaccctgagatgggagccatcttcccagtccaccatccccatcgtgggcattgttgctggcctggctgtcctagcagttgtggtcatcggagctgtggtcgctactgtgatgtgtaggaggaagagctcaggtggaaaaggagggagctactctcaggctgcgtccagcgacagtgcccagggctctgatgtgtctctcacagcttgaaaagcctgagacagctcggccgctgagggcccgagatgcaggatctcctcacccctcccctttgtgacttcaagaccctctggcatctctttctccaaaggcacctgaatgtgtctgcgcccctgttagcataatgtgaggaggtggagagacagcccacccttgtgtccactgtgacccct

SEQ ID NO: 236 - DNA, 448 bp, Homo sapiens
  misc_feature: n=a,t,g or c
actcagcatncnttttattttnctatctgacatttctaacaaaacgccagggagacggagttaaaaagaatccaccccacgaaaggtaaacaaaggagaccctcagaaactccctggcaaggatgttcccctccccagattgggcccagtttcaccagcaactgggtctcagactcagccttatgcctttccactgacaccccccacccctccacantctcgtgattcagaccagggaacttctcgggctgattgtgtccgtgtgtctgagggaggggcacgctggaacctgggaacctactgggcacctctaatgcagatgagaaaaacttgagaatgtgaaaggagatcagtccccgntcccacccgaaggtgcagagacgcgggacattaaccagcagnacgcgggggtgaaggaactcagggcaatttctcccantgccagggg

SEQ ID NO: 237 - DNA, 451 bp, Homo sapiens
  misc_feature: n=a,t,g or c
agaagtacaactcatgtcgagacatgtatttattattatgctttgatatgcaatcccaggnattctgatctggagtaaaaagcaaactaaatgaagacaacttttagaaactgatgtttattttccatcaaccattttnccatgctgcttaagagcctatgcaagancagcttaagaccagtcagtggttgctcctacccattcagtgggcctgagcagtgggagctgcaggaccagtcttccgtgggcagggctgagcgctccaggtcttcagtaggggaattgctgaatagggcacagagggcacctgttacaccttcaggaccagtctggcaacctcagggctgaggtaggcagtggaacttcagggagcggggacangttccatttcaccctggaaattcctccttgggtcactggcnttttnaggcaggaagcctgttnttatttt

SEQ ID NO: 238 - DNA, 457 bp, Homo sapiens
  misc_feature: n=a,t,g or c
tttttttttattaaaaaactttttaattggtttacaaaggaggctacagactacattgaaactaatctttgtacaaaaggccaaaaaaaaaaaaaaagtcccaaaacaccaagagacaaaaggtaggaggaaagacaagaaaggaagatacaaaaggagcaggaagaaacttacttagggacaagattagcatcatacatacctaagagtggggggtgagggggaagaacaagatgagagagcatttaaaagcatttacccacacagccctggtgataattggattggaatcaaaacaaacacagcatgagattttaagaggttttaaaaggcaccagtggtgtggctggttattgccagtgttaagagagaataacttgggttttagcaccagagattggagcaccacccatccctccagaggtgccagctttggaangggaacagncctggggag

SEQ ID NO: 239 - DNA, 2171 bp, Homo sapiens
gcacgagccatggcggacaacgagaaactggacaaccaacggctcaagaatttcaagaacaaaggccgcgacttggagactatgagaagacaacgaaatgaagttgtagttgaattaaggaagaataaaagagatgaacatctcttaaagagaaggaatgtaccacatgaagatatctgtgaagactctgatatagatggtgattatagagtgcaaaatacctctctagaagctattgttcaaaatgcttcaagtgataaccaaggaattcaattaagtgcagttcaagctgctaggaagcttttgtccagtgatcgaaatccaccaattgatgacttaataaaatctggaatattgcccattttagtccattgtcttgaaagagatgacaatccttctttacagtttgaagctgcatgggctttgacaaacattgcatctggaacttctgaacaaactcaagcagtagttcagtccaatgctgtgccacttttcctgaggcttctccattcaccccatcagaatgtctgtgagcaagcagtgtgggcattgggaaatatcataggtgatgggccccagtgtagagattatgtcataagtcttggagttgtgaaacctttactttccttcataagtccatctattcctataacattcttaagaaatgttacttgggttatggtcaacttatgtcgccacaaagacccaccaccaccaatggaaaccattcaggagattcttccagccctttgtgttttaattcatcacacagatgtaaatatactggtagacacagtctgggccctctcttaccttactgatgctggcaatgaacaaatacagatggtaatagactctggaatagttcctcatttggttcctctgctcagccaccaggaagttaaagttcagactgctgcacttagagctgtgggcaacattgttactggaactgatgagcaaacacaagtagttttgaactgtgatgctctttcacacttcccagcactcctgacacatcccaaagagaaaattaataaagaagcagtgtggttcctctccaacatcactgcaggaaatcagcagcaggtacaggcagtaattgatgccaatcttgtaccaatgataatacaccttttggataagggggattttggcactcaaaaagaagctgcttgggccataagtaacttaacaattagtggaaggaaagatcaagtggcttaccttatccaacaaaatgttatcccacctttttgcaacttgctgactgtaaaagatgcacaagttgtgcaagtagtactcgatggactaagtaatatattaaaaatggctgaagatgaggcagaaaccataggcaatcttatagaagaatgtggagggctggagaaaattgaacaacttcaaaatcatgaaaatgaagacatctacaaattggcctatgagatcattgatcagttcttctcttcagatgatattgatgaagaccctagccttgttccagaggcaattcaaggcggaacatttggtttcaattcatctgccaatgtaccaacagaagggttccagttttagaaagatgttgtggaagttaggtacaatgcagcactgagatatatatatatatatgtgtgtgtgtatatatatatatatatacatatatataaaaaggtttgatccatcaaaaaaaaaaaaaaaaaaaaaaaaaaaaaaaaaactcgtgccgaattcggcacgagcacgcgtgagacttctccgccgcctccgccgcagacgccgccgcgatgcgctacgtcgcctcctacctgctggctgccctagggggcaactcctcccccagcgccaaggacatcaagaagatcttggacagcgtgggtatcgaggcggacgacgaccggctcaacaaggttatcagtgagctgaatggaaaaaacattgaagacgtcattgcccagggtattggcaagcttgccagtgtacctgctggtggggctgtagccgtctctgctgccccaggctctgcagcccctgctgctggttctgcccctgctgcagcagaggagaagaaagatgagaagaaggaggagtctgaagagtcagatgatgacatgggatttggcctttttgattaaattcctgctcccctgcaaataaagcctttttacacatct

SEQ ID NO: 240 - DNA, 466 bp, Homo sapiens
taactcatacaaatttattttaaataagccttaaaatcagaattaaattgataaatgaagtaatctattgaaaaatgttattttacatccattctgggtattaccacaaattttaaaagtagaagcatagcatttgccagttattttaaaaaaccgagtcaatacaaattagtctcaaagttcttgaaaattaataagtgatttttctcactacttaaccatacctggaataacctttgaagaaacacctactagcaaactttagacaacaattataaaaccagattgttggcagaggacacaacaaaatgtaagttagaaaattcataaacatacatttattcaggaaatacaattactagaatccttgatatttcaatgatcattccacattataaaatattcacaaacatggtagtttttttaagtctacacccaggtcatgctgacattcctttttgggata

SEQ ID NO: 241 - DNA, 477 bp, Homo sapiens
ttcactttgcaatttcaatgtttatttctgataccaaaacttgacagcacacaaggggaaaaaaagcagtagacaaggaacagcaaataaatttatcttgcatgccactttcagtcaacaggatgtggctctctagatagctgtgtttagaaggaatctgaggcttcagctcacgacaggggaaagactactgcgattgatagcaatatccaacatctcactcaacccagaagaaaccaatggcaccaaagttggcagcgaagttggcactggctgtaccaccaggaccaataatgggaccggcaaaggtctgagggaatctggagcgggcattctggtggtatctggcccagaaggtaaatggaattctggaccagggatctccaaaatctccttcctcatcccaggtcagcagctcaaactcaatgtcatcccagctccagggcccagacacagcctcatctccaattcccatgc

SEQ ID NO: 242 - DNA, 1059 bp, Homo sapiens
gctctcgtcttctgcggctctcggtgccctctccttttcgtttccggaaacatggcctccggtgtggctgtctctgatggtgtcatcaaggtgttcaacgacatgaaggtgcgtaagtcttcaacgccagaggaggtgaagaagcgcaagaaggcggtgctcttctgcctgagtgaggacaagaagaacatcatcctggaggagggcaaggagatcctggtgggcgatgtgggccagactgtcgacgatccctacgccacctttgtcaagatgctgccagataaggactgccgctatgccctctatgatgcaacctatgagaccaaggagagcaagaaggaggatctggtgtttatcttctgggcccccgagtctgcgccccttaagagcaaaatgatttatgccagctccaaggacgccatcaagaagaagctgacagggatcaagcatgaattgcaagcaaactgctacgaggaggtcaaggaccgctgcaccctggcagagaagctggggggcagtgcggtcatctccctggagggcaagcctttgtgagccccttctggccccctgcctggagcatctggcagccccacacctgcccttgggggttgcaggctgcccccttcctgccagaccggaggggctggggggatcccagcagggggaggcaatcccttcaccccagttgccaaacagaccccccaccccctggattttccttctccctccatcccttgacggttctggccttcccaaactgcttttgatcttttgattcctcttgggctgaagcagaccaagttccccccaggcaccccagttgtgggggagcctgtattttttttaacaacatccccattccccacctggtcctcccccttcccatgctgccaacttctaaccgcaatagtgactctgtgcttgtctgtttagttctgtgtataaatggaatgttgtggagatgacccctccctgtgccggctggttcctctcccttttcccctggtcacggctactcatggaagcaggaccagtaagggaccttcgattaaaaaaaaa

SEQ ID NO: 243 - DNA, 2309 bp, Homo sapiens
ggagttggcgagtgtgttttgtgagtttttaggcaccttttgaaatgtaatcatttgggtcaatatgtaattttcagtgttagactagtaaattgtccgctaaattctggccgtttttggcttttttgttagacaatgcagatcttcgtgaagactctgactggtaagaccatcaccctcgaggtggagcccagtgacaccatcgagaatgtcaaggcaaagatccaagataaggaaggcattcctcctgatcagcagaggttgatctttgccggaaaacagctggaagatggtcgtaccctgtctgactacaacatccagaaagagtccaccttgcacctggtactccgtctcagaggtgggatgcaaatcttcgtgaagacactcactggcaagaccatcacccttgaggtcgagcccagtgacacaatcgagaacgtcaaggcaaagatccaagacaaggaaggcattcctcctgaccagcagaggttgatctttgccggaaagcagctggaagatgggcgcaccctgtctgactacaacatccagaaagagtctaccctgcacctggtgctccgtctcagaggtgggatgcagatcttcgtgaagaccctgactggtaagaccatcaccctcgaagtggagccgagtgacaccattgagaatgtcaaggcaaagatccaagacaaggaaggcatccctcctgaccagcagaggttgatctttgccggaaaacagctggaagatggtcgtaccctgtctgactacaacatccagaaagagtccaccttgcacctggtgctccgtctcagaggtgggatgcagatcttcgtgaagaccctgactggtaagaccatcactctcgaggtggagccgagtgacaccattgagaatgtcaaggcaaagatccaagacaaggaaggcatccctcctgatcagcagaggttgatctttgctgggaaacagctggaagatggacgcaccctgtctgactacaacatccagaaagagtccaccctgcacctggtgctccgtcttagaggtgggatgcagatcttcgtgaagaccctgactggtaagaccatcactctcgaagtggagccgagtgacaccattgagaatgtcaaggcaaagatccaagacaaggaaggcatccctcctgaccagcagaggttgatctttgctgggaaacagctggaagatggacgcaccctgtctgactacaacatccagaaagagtccaccctgcacctggttctccgtcttagaggtgggatgcagatcttcgtgaagaccctgactggtaagaccatcactctcgaagtggagccgagtgacaccattgagaatgtcaaggcaaagatccaagacaaggaaggcatccctcctgaccagcagaggttgatctttgctgggaaacagctggaagatggacgcaccctgtctgactacaacatccagaaagagtccaccctgcacctggtgctccgtctcagaggtgggatgcagatcttcgtgaagaccctgactggtaagaccatcaccctcgaggttgagcccagtgacaccatcgagaatgtcaaggcaaagatccaagataaggaaggcatccctcctgatcagcagaggttgatctttgctggaaaacagctggaagatgggcgcaccctgtctgactacaacattcagaaagagtccaccctgcacctggtgctccgtctcagaggtgggatgcaaatcttcgtgaagacactcactggcaagaccatcacccttgaggtggagcccagtgacaccatcgagaacgtcaaggcaaagatccaggacaaggaaggcattcctcctgaccagcagaggttgatctttgccggaaagcagctggaagatgggcggaccctgtctgactacaacatccagaaagagtctaccctgcacctggtgctccgtctcagaggtgggatgcagatcttcgtgaagaccctgactggtaagaccattaccctcgaggtggagcccagtgacaccatcgagaatgtcaaggcaaagatccaagataaggaaggcatccctcctgatcagcagaggttgatctttgctgggaaacagctggaagatggacgcaccctgtctgactacaacatccagaaagagtccactctgcacttggtcctgcgcttgagggggggtgtctaagtttccccttttaaggtttcaacaaatttcattgcactttcctttcaataaagttgttgcattcccaattggtgttttttttttttttttttttttttttaagtttattttgcatt

SEQ ID NO: 244 - DNA, 329 bp, Homo sapiens
  misc_feature: n=a,t,g or c
cattttttaaaattttattactgtttaccaatggggagatgcagttwatttacaccagcagccataggggaaaggggaatacagtwaatcagctatctgtataggawggactacttatrcaaaaataaaaatmtccaaaacaaaggacagtrgtgagcttcactaccctcccccgatgancccagcatgcrataatrrccaggcagtggtccctsggcatgcratggtgggaactaatagatatgagaagaaaaaagccacaaaccacagaaawttttaaagaaccccccccttcccccataacacacacatacacacacacacacact

SEQ ID NO: 245 - DNA, 138 bp, Homo sapiens
gaagttaaaattttatttatggctggagtggcataaaagatttgttttccatgcttcaaaaagaaaaaaaaagttttcagggcttctctccctccctatgcatcctacccttctgtttcctgttcttaactttatctg

SEQ ID NO: 246 - DNA, 355 bp, Homo sapiens
tgaacatttcatcttttactttttagcaccaacagacttgataacagcctgatgctgatctgacaatgggttgatagccttcccccactgacccttaaatctgcttagtaacaagtcctttgcttctgtcattctcctgggggatggcctactcgccctcctttctgtacaatctgggcaaaccgactggtgatggcaagagtggtgtcaatgaagcggtctacacagctggagagacaattttcagtgcgagagtctaggcgattccctggcttctccacacatttatcccaacataactccatgaagtgatgcacctgtgcagtaaactgcgccttctgctgctcggcggcca

SEQ ID NO: 247 - DNA, 431 bp, Homo sapiens
ttttgtaagcagtctggattcgtgtttattgaagccagtaattagagacatctttttttcccaggactagaaagcaaggttccacatgactgcatactgcacccggacagagccacacccctggactaaggctggtgggggataatctgcagtcttacttttaagttagaaacaccaataaatttagtatacagacgacagtgaactttcacttacagcattaacattgttaaggtcatgatgtacagagcagtcactttcaactttgttaaattaataaaacatgacaatgtcttcagtttaaataccgattttaaaatgccaatcaaaaaaaagtgcaaacaaaataacaatctagcagcattatctgttgcatttttaggaaagaccaattcttggctgttatcttcagccacgtattcaaaggtggg

SEQ ID NO: 248 - DNA, 321 bp, Homo sapiens
tttttttttcggtcataagtttaatgaagtctgaaaggtaagcgccatcgtggtcagagatacggaggcccggtcagactctccctctgcacctcaatggaaacgatgtggtgtccgggtaccatggccaggcccagcacacggggctccccggcagagaaggaatccgacggcttgaggaactcctgcgccgagcccaggatgacattgcagtcacggtcagtgcagaggaagcagccgaccagtgtccgtccatctgtcatgcgaatggcatagtcttgttgagcagcgcctctagctgctgtcgggcgcgctcagccg

SEQ ID NO: 249 - DNA, 193 bp, Homo sapiens
acaaaagggtctttatttgtaaaaagccaaaggggcccctggcggacaggaacaggcaggcggcattctcaggggtcaggggcatttgggcagatgcgcttgagtgggggggcactcccgaagtcctctgtgtcaccctgggctgcctcagggacaggtggcactggctcaaagacagggctaagcttcgggg

SEQ ID NO: 250 - DNA, 319 bp, Homo sapiens
  misc_feature: n=a,t,g or c
atggtttatccctttattgtttctcctttgatcaaaacgtgtcacagctgggaaccaagaggaagtaaaaaaaatacccacaaatatnccccgannccccattagtccnnncccannnccccacccagggcttccagccaaccccgagcacacatgatcatctccccccaccctcaggcttctcctagcaataaatacaggtgaccatgattcactgaaaccacaactgatttctccatcttaagtgcccctcaaaggggacaagaaagggggcaaaagaagtttaatgcgnatcccctaagaggtgtggaaacgtctt

SEQ ID NO: 251 - DNA, 223 bp, Homo sapiens
  misc_feature: n=a,t,g or c
ccaaggccccaggggggttttatttttcctttnnaacaacccgtncggggggttcccggggtcttttggcccgaatgccgaagagccgggggtgggaacgggccaaacggagactagcgaaggttttgaaattgttctcttccccagggatgactcgagctttctccccctnaaagacgttccggacgggnaagaccggtccggtaaactaggggggccaatt

SEQ ID NO: 252 - DNA, 439 bp, Homo sapiens
  misc_feature: n=a,t,g or c
ncattannctttatntcctgtactgtgaagtgtgttgaaatgtggaagttatttcacaaagttaacagggtcttcaagacagaagagatatacgtgcagagtacacacatacacctacgtacacacctgtatatgtcgatgacgacagcatggagggaatgaacttgtgcatggagaagggggctttttttaaacttgaaagaaaccagcccattctgtgtgtgtttggaggaggggagcctgtaaagcctatttaccttgaatcccctctggcttacagctgcagagagcaaaggagagcagacatattctaggattggggcagtggggatgatgggtgattgcgttgctgctcaacgagtctggggtttgcagggtccaagggtaatgaccctttcccctgaggggccctcattcaaaggggctgagggttgcaagc

SEQ ID NO: 253 - DNA, 5724 bp, Homo sapiens
agtactgccaaattcgagacaatctccatgacctgacaatttaccttctatttgggtaatttattgtcccttacgcaaactctccaactgtcattgcacagacatatgatctgtatttagctctcactttaggtgtttccattgattctattctcactaatgtgcttcaggtatatccctgtctagaagtcagattggggttaaagagtctgtccgtgattgactaacagtcttaaatacttgatttgttgttgttgttgtcctgtttgtttaagaactttacttctttatccaatgaacggagtatcttgtgtcctggaccctttgcaagaacccttcccctagcaacagatgcgtcatctcaaaatatttttctgattggccaaagagtaattgatttgcattttaatggtcagactctattacaccccacattctcttttcttttattcttgtctgttctgcctcactcccgagctctactgactcccaaaagagcgcccaagaagaaaatggccataagtggagtccctgtgctaggatttttcatcatagctgtgctgatgagcgctcaggaatcatgggctatcaaaggtaggtgctgagggaatgaaatctgggacgatagactacgaagcattggagaaaagacctatggacatttggaagataatgtgtggagtgaaagaatagtgtgacaggtattatgtggtctcgacagaaagtataacaaattgtggtttggtggagttcttccctcaccacaaactgaagtaagtcaaatttggtttagagggtcaaaactgagttgtgtattgatgaatagcacggtcctgctacaagccaaactgggggtgggggtgggggtgggggaggaagaatattttctggcaagcattaacaagttatatttctgggctttaattattctttctggaaaattagtaaaattaaaaactaaaaaccacacatagttttgttagaattaaatgaaaaaaaaagttattagccctgttcttatctgaatacatgatacagtagttattttttggagtgtaaatcctgtcggtatatattgagcacatatattgtgttgaagattactagaaggaaaagtcatcaaaaagcaacaatttaccccaggaaaaggggagggaaggcatgctgatatgagttgcctcatgggacagtgatagccattccctgccttcccatctccatggtacagcagatcttatatcatgttaacttagtaatatttccaagagagtagaaaaataagtaaggaaatggggaatctgatattattgtctctcatctccagagcaacattggtgctgttgtaaagatgtactgtagaaaagtattcttcacccagcgtgacccccacagaaggtgtcaggtagacttggaataagcaaagtaataacccagctcccatacccatagtggcaattgtagatttctattgccccaaaagagccatacatagggatacttacctagaaagacagaggatcttcccttggtttgtgaagaggcagctagtatatttgtgtgtgtttgcatagatggaagtaaataaattcctaggtttatcaatacacagtcaaacatttaaaatctctcatcttggctgggcacggtggctcacgctaatcccagcactttgggaggccgaggcgggcggatcacgaggtcaagagatcgagaccgtcctgggcaacatggtgaaaccccgtctctactaaaatacaaaaaattagctgggtatggtggcacacgcctgtagtcccagctactcgggaggctgaggcaggaggattgcttggcccgggaggcggaggttgcagtgagctgagatggtgccactgcactccagcctggcgatagagcaagactccgtctcaaacaaccaaaccaaaacaaaacaaaatatctcaccttatctttgaagactaaggaaaaaaaaaatctcccactcatcgatacactccacagaggcagcatactctcccagtgtagctttctcttttcatgttcattattcccttggtgttggttattctcaatgtcaatcgtaacagaacatcttccataataacagtcccaatttaaggagcattaagataaaaggtggaattgccaaggtcaatccagacgagaaccttctcatagaggtaaccaccgtgtgggtttggatgctgggaagcagggggactatgacgctacaaggtctcagtcttaatttttggagtacttcagtccccaggtatattttccatagatttggcccttaaataaaaagaagcttctgactctaaaatgtaaacagtgcttgttacagtcttgttgatatattaagaaattactcaccttatctcatttaatcttaaaaacaaacccctgacaggatcaaaaccacagcaggactacataataggaaaactatacataaataggtagaataatctgctcaggatcactaggtaagttgctgaataagaattcaagatgaaaaagatcccagagtttaaaacccaacctttcaaacagtgtttccttcttcttagagtacaatgttctgagaaagagatcctctggaattctggcctaagtgtatttaatgcccgggtaaagaaagtgagagaacatttctctttaggggctgctgctggatttctaaaaagaaaataatttctcagctagtaacatggagccaaacaacagcttcacaagactctgggttctttagccctcatctccttcaatccaccctcttataaccagtccttcttgtttttcccctcccagctttgttcagcagcatgcccttcacccagaccttgtcttgtcactcatccctactcgccatcattctttcattcctcttggcccaatctctctccaccacttcctgcctacacgtatgtaggtcaccattcccctctcttgattccccccgcccaactctctttctccatttcttgcctttcagaagaacatgtgatcatccaggccgagttctatctgaatcctgaccaatcaggcgagtttatgtttgactttgatggtgatgagattttccatgtggatatggcaaagaaggagacggtctggcggcttgaagaatttggacgatttgccagctttgaggctcaaggtgcattggccaacatagctgtggacaaagccaacctggaaatcatgacaaagcgctccaactatactccgatcaccaatggtacctccctctctgctgcactcctggacacgggaatccatagtttgaaagtagttgcttcagctctttgtgttagattattgtaactgattttccctccaagggcctaaccttgccattaacaagccccaaattctcatgccagaggtctgagaactttatgggtttgatcctatcttgttgtgctcaagtcttgtctctgtcatccatggtctcctacgaagtcattgccctaagttcatgctaggggagccagaagggaagtccttggatatcttatacctcaatattggctcaatctcttggggagggggtgctgtcagagactgttatctgaggatgtgacatagacttctcagggcacaatttcaactactttttcagctttagggtttttagatacgtttgtaccacaattgagcatgggagggagaggggtgagcctaagcagtgacggctgattctgtcacgtctgtcatgtgtcccccagtacctccagaggtaactgtgctcacgaacagccctgtggaactgagagagcccaacgtcctcatctgtttcatcgacaagttcaccccaccagtggtcaatgtcacgtggcttcgaaatggaaaacctgtcaccacaggagtgtcagagacagtcttcctgcccagggaagaccaccttttccgcaagttccactatctccccttcctgccctcaactgaggacgtttacgactgcagggtggagcactggggcttggatgagcctcttctcaagcactggggtatggaccaacactcaatctcctttatttcaaggtttcctcctatgatgcttgtgtgaaactcggtgttctaactgtttcataatatctgctacaattaatataactgtcttctcctactatccagcttcctcctttttttaatctgtaattctctcaatacatcattctgtcttcctcttctttaatctatgaataacttttctctttctaaagaaccctacatttgattctgagtgttacttcttcccacactcattaccatgtactctgccttatctccccccagagtttgatgctccaagccctctcccagagactacagagaacgtggtgtgtgccttgggcctgactgtgggtctggtgggcatcattattgggaccatcttcatcatcaagggattgcgcaaaagcaatgcagcagaacgcagggggcctctgtaaggcacatggaggtgagttaggtgtggtcagaggaagacatatatggagatatctgagggaggaaaatcagggtggggaaaggaaatgtaatgcatttaagagacaaggtaggaacagatgtggctcttgatttctctttgctagaatgaatcagacattggtatcatctggtaccccaaagcttcagggtctgtcatccctttctatagacgggcaccttgatcacggctccagtcttagaaatcatctccagtacctaaaaccattgtttcacattagaatactgagtctagggatctagaaaatacattagaatatggagtctagggatctagaaaatactgagtctagggatctagaaaaataagcctcaagatttgggcacatcctagcttgtatttcctggggcaggtcatcagttcagaagcatttccagatcctggctcctttcaggttagggtcaattcgttgcatgaaatgggaatctcttagaggccaatgcctgcttttgcttctttagtctcaaatgtagtatgagaaactctaaaaaagggtaagacatggttgcttattatgttcagttggagagtaggaactaactgtatacagttagttcatgttggaaaggttagatgaacattgaaagaattttgcaaagtcaaaggattaagagagaagaggaaggaatctgaagcaaggagctcaaaacggatcttaaattccttggtaactatgtgtgtcttgctataggtgatggtgtttcttagagagaagatcactgaagaaacttctgctttaatgactttacaaagctggcaatattacaatccttgacctcagtgaaagcagtcatcttcagcgttttccagccctatagccaccccaagtgtggttatgcctcctcgattgctccgtactctaacatctagctggcttccctgtctattgccttttcctgtatctatttcctctatttcctatcattttattatcaccatgcaatgcctctggaataaaacatacaggagtctgtctctgctatggcccatggggcatctcttgtgtacttattgtttaaggtttcctcaaactgtgatttttctgaacacaataaactatttgatgatcttgggtggaatttttggtgtttaagccagttctttgggtggcggtggggggtggggagtcggtcctggggaatatatgtgatcctttcccggtaaaatatctgaatgttgaatttatcttataaattctagaattc

SEQ ID NO: 254 - DNA, 232 bp, Homo sapiens
  misc_feature: n=a,t,g or c
agtganagttttntacactttattatgtacattgttggaaagggaggccacctggngaaacttctgcactggcactgtgttcctagagctccttctatgcggccctcccaagtgatttaatttcaggctgattggactacgaattcacaaggcagaaaagtcaaggtcatttggnatctggagacaggagaactcaaggaaccaaaagtactgttactctaagtctcagaaa

SEQ ID NO: 255 - DNA, 185 bp, Homo sapiens
  misc_feature: n=a,t,g or c
attgtnaacagtgtttttatttatacctacaaaaagaaaacaagatggatgggtatcaaaaggacaatttacaaactaagaatagtaccatagctttcagcatcctgtgcctgaacatcacacatctacaagtctttcaagtcttaatgcaccaggaatgtgtctggagaccagcaagaacatca

SEQ ID NO: 256 - DNA, 549 bp, Homo sapiens
ctcgcgctactctctctttctggccttgaggctatccagcgtactccaaagattcaggtttactcacgtcatccagcagagaatggaaagtcaaatttcctgaattgctatgtgtctgggtttcatccatccgacattgaagttgacttactgaagaatggagagagaattgaaaaagtggagcattcagacttgtctttcagcaaggactggtctttctatctcttgtattatactgaattcacccccactgaaaaagatgagtatgcctgccgtgtgaaccacgtgactttgtcacagcccaagatagttaagtgggatcgagacatgtaagcagcatcatggaggttgaagatgccgcatttggattggatgaattcaaaattctgcttgcttgctttttaatattgatatgcttatacacttacactttatgcacaaaatgtagggttataataatgttaacatggacatgatcttctttataattctactttgagtgctgtctccatgtttgatgtatctgagcaggttgctccacaggtagct

SEQ ID NO: 257 - DNA, 433 bp, Homo sapiens
ccacgcgtccgggcggcttgtgcagcaatggccaagatcaaggctcgagatcttcgcgggaagaagaaggaggagctgctgaaacagctggacgacctgaaggtggagctgtcccagctgcgcgtcgccaaagtgacaggcggtgcggcctccaagctctctaagatccgagtcgtccggaaatccattgcccgtgttctcacagttattaaccagactcagaaagaaaacctcaggaaattctacaagggcaagaagtacaagcccctggacctgcggcctaagaagacacgtgccatgcgccgccggctcaacaagcacgaggagaacctgaagaccaagaagcagcagcggaaggagcggctgtacccgctgcggaagtacgcggtcaaggcctgaggggcgcattgtcaataaagcacagctggctgag

SEQ ID NO: 258 - DNA, 382 bp, Homo sapiens
aacgattttcaccaactttattggctcccgccgggaccctcgccgcccacctccccgctagatgtcaccggccctccatgacatccagcacattcaaaagcattgcgggacgaccatgaaaagggcctttgctggcggacttcccttgagggcggcgtcagggtcatttgctcttcgtcttctgactctccgtcttcttgggcagcagcacggcctggatgttgggcaggacgccgccctgagcgatggtcactttgcccagcagcttgtttaactcctcgtcgttgcggatggcgagctgcaggtggcggggaattatcctggtcttcttgttgtcacgcgcgggttgccagccagctccaggatctccgccgtaaggtac

SEQ ID NO: 259 - DNA, 350 bp, Homo sapiens
  misc_feature: n=a,t,g or c
taanaannttggatttagcggctgagtacttcctcttgtacatggcctttctggaatacatggcagatcgggaatacctgccaattcctctgacaaggacagggttgcggctgcaatggggcttccccttcttgggctttttagctttgaggntaccctttttcancttgccaccagcatcaaccttcttggcttcgggtttcttctctttagtatctggcttctcaactttttcacccgccatcttggatttagcggctgactacttccncttgtacatgggcctttctcattcccgtcctccggcctgggctacagaatgaggacttcttctaggcttgcgntttcca

SEQ ID NO: 260 - DNA, 346 bp, Homo sapiens
cagatggagttttactcttgttgcccaggctggagtgcaatggcgtgatcttggctcaccgcaacctctgcctcctgggttccagcaattcttctgcctcagcctcccaaatagctgggactacaggcatgcgccaccatgcccagctaattttatatttttagtatagacgtggtttctccatgttggtcaggctggtcttgaactcccgacctcaggtgatccacccaccttggcctcccaaagtgctgggatttcaggcatgaggcaccacgcccagccttgaccttgcttttataaccaacccatgctcacaataactaatccactcccacaacaataacat

SEQ ID NO: 261 - DNA, 430 bp, Homo sapiens
cttctcttaccgccatcttggctcctgtggaggcctgctggaacggacttctaaaaggaactatgtctggaaggctgtggtccaaggccatttttgctggctataagcggggtctccggaaccaaagggagcacacagctcttcttaaaattgaaggtgtttacgcccgagatgaaacagaattctatttgggcaagagatgcgcttatgtatataaagcaaagaacaacacagtcactcctggcggcaaaccaaacaaaaccagagtcatctggggaaaagtaactcgggcccatggaaacagtggcatggttcttgccaaattccgaagcaatcttcctgctaaggccattggacacagaatccgagtgatgctgtacccctcaaggatttaaactaacgaaaaatcaataaataattgtggatttgt

SEQ ID NO: 262 - DNA, 532 bp, Homo sapiens
tttgaattgctgaatttttaatctgtaacacaaaggttgccaaacattcccccaaaggagcagctctcagtggggtggcggtggatgcgaaacagctgaagacgcggggcagttggcctggcttccgttgcacgggctggcttgccgcgggagatgggtgggtggggaggggtggggggactcgaggcaaccccccagagcggcctctgagcgcctaggaggaacctgaaggcgggaagggggaagatcgtcaggtcaaaggcgggagtctcagggcttatggggtggggaaggagggtctgggtggaaaggtacctcagggagcctaggaggctgtcagcgtgacgggggtgtttcggtacaaatggaggccttcagacctactgagtggggggctccagggttggggccgtcctcaggatggaaggatggtgggtctcggtatagggagacctctgggtggaaaggggctgcggggagaccgcagcagaggcgaaggtggaacctcagattggaaagtgtccgttggagc

SEQ ID NO: 263 - DNA, 360 bp, Homo sapiens
  misc_feature: n=a,t,g or c
tttttgccaaccacagccacaaaggtttaatcagtttttatctcacaaggtagtaacaatgaggggcacagtggtggtcagggtggtggccccagtggcaacttaggggantatggcctcctccacanagccgntgcctggggaagatgntntcagggcacgaccacagcccagcanttgccccaccccantcaataaaaggctntagtgntctggtgggntntgcaccgtgcgcagatcctcctggngggcactggaggccagggagaaaaagagcctccccgcagcccagntccagcatgcaaggtgctagatttntcggcaattccacagggaaggacagtagccttttccctgccc

SEQ ID NO: 264 - DNA, 1063 bp, Homo sapiens
cgaagcggagtgagaaggacggtcccgttcgtcacgaacgtccgtccctcgtccgtcgcggctcggacccggtccgggagagcagtggcggtggtgcggagagacgcagcggaggttttcctggtttcggaccccagcggccggatggtgaaatcctccctgcagcggatcctcaatagccactgcttcgccagagagaaggaaggggataaacccagcgccaccatccacgccagccgcaccatgccgctcctaagcctgcacagccgcggcggcagcagcagtgagagttccagggtctccctccactgctgtagtaacccgggtccggggcctcggtggtgctcctgatgcccctcacccacccctgaagatcccaggtgggcgagggaatagtcagagggatcacaatctttcagctaacttattctactccgatgatcggctgaatgtaacagaggaactaacgtccaacgacaagacgaggattctcaacgtccagtccaggctcacagacgccaaacgcattaactggcgaacagtgctgagtggcggcagcctctacatcgagatcccgggcggcgcgctgcccgaggggagcaaggacagctttgcagttctcctggagttcgctgaggagcagctgcgagccgaccatgtcttcatttgcttccacaagaaccgcgaggacagagccgccttgctccgaaccttcagctttttgggctttgagattgtgagaccggggcatccccttgtccccaagagacccgacgcttgcttcatggcctacacgttcgagagagagtcttcgggagaggaggaggagtagggccgcctcggggctgggcatccggcccctggggccaccccttgtcagccgggtgggtaggaaccgtagactcgctcatctcgcctgggtttgtccgcatgttgtaatcgtgcaaataaacgctcactccgaattagcggtgtatttcttgaagtttaatattgtgtttgtgatactgaagtatttgctttaattctaaataaaaatttatattttacaattttattccgg

SEQ ID NO: 265 - DNA, 461 bp, Homo sapiens
tttttttttttcctttaaaaattttaatggacaggaaatggtatagaataactgccaagtcacataagttaacttttttgttaatgtttgtgatcccggaaagaacacactatcagtcgatgcaaaccgcatgggcgttttcatcagtcgttgtcttagcacatgaccgagtgtgggccacggacccatctttacttggtccagaaataaaagcggctgccatgtgtggaggctgcagatctccctcgatctcagggctgggatccggtcttggtcttgagtgatagggattctccggtaaaggtcgatctgttttcactttggtgacctttgacagttctcccaggtcaggccgcacccagcccagtttgtccagcacacactcgtcaaactttgcctgctgtttgcgacagtgacgaaataactgctggccagtataatcaatgcaagtccaatattct

SEQ ID NO: 266 - DNA, 335 bp, Homo sapiens
tttttttttttttttttttttaaaattcaacagctttattgtgaaagaatccagagatctcacactgaaaaaatactaacacagctcatatataaattacttatctataagaacaattatagaaggaatctaaatggggcaattttaacaaaccaggcaaaatatcacatatacctgaatataaggtaactccaagccatgagtataagattaaggcagttactttattttgaacaaggaagtggcataagcaactcagtgtgtgccccttagggggggagctcttccccctaccactccccaccccaaggcatcattttggagaaaaaagtgtc

SEQ ID NO: 267 - DNA, 468 bp, Homo sapiens
tcctctgtccacacaggtcagcccaaggccaccccctcggtcactctgttcctgccgtcctctgaggagctccaagccaacaaggccacactggtgtgtctcatgaatgacttctatctgggaatcttgacggtgacctggaaggcagatggtacccccatcacccagggcgtggagatgaccacgccctccaaacagagcaacagcaagtacatggccagcagctacctgagcctgacgcccgagcagtggaggtcccgcagaagctacagctgccaggtcatgcacgaagggagcactgcagagaagacggtggcccctgcagaatgttcataggttcccagcccccagcccacccacaggaggcctggagctgcaggatcccaggggaggggtctctctccccatcccaagtcatccagcccttctccctgcactcatgaaaccccaataaatatcctcattgac

SEQ ID NO: 268 - DNA, 229 bp, Homo sapiens
tttttttttgaaacaagtaaatcattggctttattctgggtcctggaagctccactgtgagtctgaaaaaaagacacaacaggggcggcactcgggggctggtgcagaaaatagtccctggctcctctggccctgggagcctaaagggcagtgaggagaaggcttagcaagaggcctggagcaggggaagtcaggtccctcaggaacccctcctcccccagaggaagga

SEQ ID NO: 269 - DNA, 294 bp, Homo sapiens
cgggggttggttttcacatttttattgggagccgtgggaggggccgcctctgtcagtggaggtgctcacagtttcttcagccactccaggctggggccctgagggtcctgggggtggctgggcacgtcgggcatgttcccatcatcacggacgggcactgggtagttgtagggcgtggccttgttgatcatgacggagtacttgaagtaggggctcaatgggggcagaattacagcgaggcccccgacgacgaaggacacgaccagcactggctccttgtcccaggcattcttt

SEQ ID NO: 270 - DNA, 194 bp, Homo sapiens
aatgagacagtcttgctctctgtgacccaggctggagtgcagtggtgtgatcacagctcactgcagccttgacgtctcctgagtaactgggaccacatgcatgcaccatctgtctggctatttattttttttgagagacaacgtcttactacattgcccagtcctatctcaaacatctgggctcaagcaatccg

SEQ ID NO: 271 - DNA, 319 bp, Homo sapiens
tagcattttggttatttttagttaaagaaaaacagctttctccaagggcgacaaagtgaactgaaggtcagaaggaagctgggtgcgggcttcctgcaagctcttgctccaaaacctggaattaagaaaaggccgccccgaagctctgggaaagtttggtacacacggggttcccttgtgggggagaaaagccgccaagccacacacggtcactggattggtgtgagtgggttccaagcgactgccatgtgctagtccactgacatgattgacattaacattcttggggggcattaaattaaggaatgacacagggagc

SEQ ID NO: 272 - DNA, 401 bp, Homo sapiens
tgaaaggtttaaacgctttattgtgcccaaaaaaaggcccatggaatgaagggaagagccgcgcagccgtgagccgggagcgattgtttgtcgcgcacccaaaggcaaggagggtggggagctgggaaaggatgcgcggcctccggtgccccgcgcgccatgggcccggccaaccagcgaccccgcccggtggcgaggcgcggcctcggccatcggcgccctaggggccagtaaccatgacgacggccgttgccaaggccgagagccaatagaggcgtcgcgggcgctgtttcaaaaacctaaagcaaacaacgaaaaacgctacatcgttgggggaggggaaagactgagaggacccggggcccctccctgaggctcagaccaggcctcgcggccccggc

SEQ ID NO: 273 - DNA, 288 bp, Homo sapiens
aaaaataaagcctctttattggtacctgtaagctcaggtacaaggtgttcccacaagcacacaggctggcaaggcctcctgggcaaggggcaggcccagagcctgcgtttcttggcacagacacagagagaaatggaataaattatagttctgacactcagggacaatgtagaaattatgatgcaaaattaaacattagcaaacaaagggtataaaaaccctcaggagccacccctcgccaactggcctcagggcatgggcaggtgggccacggttgaagtgcagtgc

SEQ ID NO: 274 - DNA, 165 bp, Homo sapiens
ctctttgagtaactttattttggaggagttccataagcattaggaacatacataaaatgacacaccactgttgacaatgaaaaaaaaaacagcatttgatattttccagctttttaagttaaaaaatgattcagttaaaacaaaacaaaagtttagatattttag

SEQ ID NO: 275 - DNA, 1452 bp, Homo sapiens
cggggaggacggtctgcatactcgctgcccgccggctccctcccccgcgtccctgcgaccgccgcggcgaagatggcctcaggagtgcaagtagctgatgaagtatgtcgcattttttatgacatgaaagttcgtaaatgctccacaccagaagaaatcaagaaaagaaagaaggctgtcattttttgtctcagtgcagacaaaaagtgcatcattgtagaagaaggcaaagagatcttggttggagatgttggtgtaaccataactgatcctttcaagcattttgtgggaatgcttcctgaaaaagattgtcgctatgctttgtatgatgcaagctttgaaacaaaagaatccagaaaagaagagttgatgttttttttgtgggcaccagaactagcacctctgaaaagtaaaatgatctatgcaagctccaaggatgcaattaaaaagaaatttcaaggcataaaacatgaatgtcaagcaaatggaccagaagatctcaatcgggcttgtattgctgaaaagttaggtggatccttaattgtagcctttgaaggatgccctgtgtagattattcagtgccacaaattgaaagcttccatgtttaatgttatcctcttgctatataaataaagcaaatatatttaggccagggtctcactgagggggagctgtcttgtcatcttttagagtaaactattctataaacatatgcaaacagccctaaataaatctaaagtctaaagttttattgatgtgaaattaaattcttattggccaaatgcctgttttgatgagttgatttataaagatttttgttaagctcaggattttaaattacacagttcacaaacagtaaaggccatgtgaagagaattattacatctttattaacctcagcatttactttgtttcttttgcttaggaaattgctcataatctggttataattttggtccaaattctttattcttccttgagctaagcagaataatggaatataatatgtcttcataatataacaacactaatacactaatagtaagattaagttaggcagtcttctaccaaatgtgtaatggagattgcctcaaaattgtgtccacataatccacgctcatcttgcaaagcgctatttcaggcacatcattggaatacaggaagtagccctgcacctgccagtgagctcgccattcactgattggaagagtgacctggcatcttggaaatcattgtgtgtcttcaggagaatgtgcagtgtcttgtaacaactaattaataatgcaaattagggctacattgtaatctgctttgttaatgaaaatgataaaacagaatattgacaagctaggacacctgtggtatctttaattgtatctccttcagaagtttgcttcttatggtataataaagtatggaagaataaaaaaaaaaaaaaatctagagtcgccg

SEQ ID NO: 276 - DNA, 2000 bp, Homo sapiens
tttgggctgtgtgtgcgacgcgggtcggaggggcagtcgggggaaccgcgaagaagccgaggagcccggagccccgcgtgacgctcctctctcagtccaaaagcggcttttggttcggcgcagagagacccgggggtctagcttttcctcgaaaagcgccgccctgcccttggccccgagaacagacaaagagcaccgcagggccgatcacgctgggggcgctgaggccggccatggtcatggaagtgggcaccctggacgctggaggcctgcgggcgctgctgggggagcgagcggcgcaatgcctgctgctggactgccgctccttcttcgctttcaacgccggccacatcgccggctctgtcaacgtgcgcttcagcaccatcgtgcggcgccgggccaagggcgccatgggcctggagcacatcgtgcccaacgccgagctccgcggccgcctgctggccggcgcctaccacgccgtggtgttgctggacgagcgcagcgccgccctggacggcgccaagcgcgacggcaccctggccctggcggccggcgcgctctgccgcgaggcgcgcgccgcgcaagtcttcttcctcaaaggaggatacgaagcgttttcggcttcctgcccggagctgtgcagcaaacagtcgacccccatggggctcagccttcccctgagtactagcgtccctgacagcgcggaatctgggtgcagttcctgcagtaccccactctacgatcagggtggcccggtggaaatcctgccctttctgtacctgggcagtgcgtatcacgcttcccgcaaggacatgctggatgccttgggcataactgccttgatcaacgtctcagccaattgtcccaaccattttgagggtcactaccagtacaagagcatccctgtggaggacaaccacaaggcagacatcagctcctggttcaacgaggccattgacttcatagactccatcaagaatgctggaggaagggtgtttgtccactgccaggcaggcatttcccggtcagccaccatctgccttgcttaccttatgaggactaatcgagtcaagctggacgaggcctttgagtttgtgaagcagaggcgaagcatcatctctcccaacttcagcttcatgggccagctgctgcagtttgagtcccaggtgctggctccgcactgttcggcagaggctgggagccccgccatggctgtgctcgaccgaggcacctccaccaccaccgtgttcaacttccccgtctccatccctgtccactccacgaacagtgcgctgagctaccttcagagccccattacgacctctcccagctgctgaaaggccacgggaggtgaggctcttcacatcccattgggactccatgctccttgagaggagaaatgcaataactctgggaggggctcgagagggctggtccttatttatttaacttcacccgagttcctctgggtttctaagcagttatggtgatgacttagcgtcaagacatttgctgaactcagcacattcgggaccaatatatagtgggtacatcaagtccatctgacaaaatggggcagaagagaaaggactcagtgtgtgatccggtttctttttgctcgcccctgttttttgtagaatctcttcatgcttgacatacctaccagtattattcccgacgacacatatacatatgagaatataccttatttatttttgtgtaggtgtctgccttcacaaatgtcattgtctactcctagaagaaccaaatacctcaatttttgtttttgagtactgtactatcctgtaaatatatcttaagcaggtttgttttcagcactgatggaaaataccagtgttgggtttttttttagttgccaacagttgtatgtttgctgattatttatgacctgaaataatatatttcttcttctaagaagacattttgttacataaggatgacttttttatacaatggaataaattatggcatttctattg

SEQ ID NO: 277 - DNA, 283 bp, Homo sapiens
  misc_feature: n=a,t,g or c
gatcttgtaccaagccaacgggtntcctggctctcctgcccacaggatgaacattttcggcttccttaggagttttgccctaccgtattccaaagcgtgtgctggtttctcatattgtctgtaggctcactcagcccgcagtttatgtgtgtgcttttttctatgaaaaatgatgtattttgctacttcctgtgtacaaagttttattgtaaatgttttttgtgctttgcatgaacaggggccacgttgttgcaattgtttcagtagaactggtttgatttct

SEQ ID NO: 278 - DNA, 421 bp, Homo sapiens
tttttggagttccagtgggcttttattgagataaattaacaaaaaccaagattttaccatatttttggaaccttataaactcagcagactccggtccatatatgcgtacatacaacataacacatcccaacaaaaacagagcccccccgccccactggaacatctgccaattaagagaaagccaattttcccttcccccaatgtttctgaaattttgagttcccactgttcacttctcagtggaactggtcccttgtggctagggacattggaattctctaccatttttactgaacaaaaaataattttttttcctgtttcaaaaaagggaatagtgactttgttttctccaggctccccttcccccacaaccaatgtaaaattacagcagcctgtatcttaataacccagccctacccct

SEQ ID NO: 279 - DNA, 503 bp, Homo sapiens
  misc_feature: n=a,t,g or c
ttttntttaatttaaagtttattnactttgaagtaaccaacnttaaannttggcctgagttaagtgtattaaaaagaagaaatacgtcgtaagatggcagtataaattcatctctgcatgtagaaaccggaaaaaaagcaagttcagtacttcaccaaaaantttcaacattgcaaacacaggaanttgagaactgacaancagaantactaggangtgcaaagtcttgaagctccaanacaanaacagcantcttggaagggcccctantctacctcctcantggtggggnctgacccaggaccctcccttgggaccctgagccccgaagcccccaggnccggggaccaccggcnaccctgggtgcagtccgctgntgatgggggttacacacctgntccagntccttcctcttgtgnttcaaactcggtccttntcgggccaagggtnttgggggtccagcacggaggatggacctntttggacacttgttccggnacctt

SEQ ID NO: 280 - DNA, 461 bp, Homo sapiens
ttagatatttgaaatacaactttattctgattctaaacgaaaaggaatgggaatgacagtaacaaacaagatttcaccactgaatattgtgatgtgactgcagcagtcttatatatgaaactcaaggaatcaactgcgttccaaaacagctaaatatgcaggtccaaacaatgaagttattttttaaactgccacattcactccgaagcccactcatctccttcagcatcccacagatgaagcacatgttccgcttagctagataataatgaggtggcacacaccgctgcacccgctgacatcacaggacagctgcctataaaactagacttctgacgctgggctccagcttcattctcacaggtcatcatcctcatccgggagagcagttgtctgagcaacctctaagtcgtgctcatactgtgctgccaaagctgggtccatgacaacttctggtgggg

SEQ ID NO: 281 - DNA, 2519 bp, Homo sapiens
agtcccgcccctgcgtgcggcgcttctcccaggccccaccttccatccagtgccctggaccctcggctgggtagcgccaccagagcgaccaaacgtcccgcgccttccaggccgcactccagagccaaaagagctccatggcggcggcggccaagcccaacaacctttccctggtggtgcacggaccgggggacttgcgcctggagaactatcctatccctgaaccaggcccaaatgaggtcttgctgaggatgcattctgttggaatctgtggctcagatgtccactactgggagtatggtcgaattgggaattttattgtgaaaaagcccatggtgctgggacatgaagcttcgggaacagtcgaaaaagtgggatcatcggtaaagcacctaaaaccaggtgatcgtgttgccatcgagcctggtgctccccgagaaaatgatgaattctgcaagatgggccgatacaatctgtcaccttccatcttcttctgtgccacgccccccgatgacgggaacctctgccggttctataagcacaatgcagccttttgttacaagcttcctgacaatgtcacctttgaggaaggcgccctgatcgagccactttctgtggggatccatgcctgcaggagaggcggagttaccctgggacacaaggtccttgtgtgtggagctgggccaatcgggatggtcactttgctcgtggccaaagcaatgggagcagctcaagtagtggtgactgatctgtctgctacccgattgtccaaagccaaggagattggggctgatttagtcctccagatctccaaggagagccctcaggaaatcgccaggaaagtagaaggtctgctggggtgcaagccggaagtcaccatcgagtgcacgggggcagaggcctccatccaggcgggcatctacgccactcgctctggtgggaccctcgtgcttgtggggctgggctctgagatgaccaccgtacccctactgcatgcagccatccgggaggtggatatcaagggcgtgtttcgatactgcaacacgtggccagtggcgatttcgatgcttgcgtccaagtctgtgaatgtaaaacccctcgtcacccataggtttcctctggagaaagctctggaggcctttgaaacatttaaaaagggattggggttgaaaatcatgctcaagtgtgaccccagtgaccagaatccctgatgttaatgggctctgctcatccccacagtctcgggatctcagggcacaatggctggacaggggtgggctctgatgcagaactttctcttttgaatgttaagaataactaatacaattcattgtgaacagaagtccttaagcagaggaattggtgtgccttaaagatacaatctgggatagtttgggggaacttgtagccagaatgccctgttcatgctgagcaaagttcagcaagtagagcagagtttggcaggcaggtgccaggaactccccttcttcctggagtgccttcattgaggaaggaaatctggcccttgggtttcctggttccactgctactgacccagaggggaatgagggctgagttatgaaaagataacttcatgaagacttaactggcccagaagctgattttcatgaaaatctgccactcagggtctgggatgaaggcttgtcagcacttccagtttagaacgcaatgtttctagagacatattggctgtttgttttgatgataaaaggagaataagaaaaggcatcactttcctggatccaggataatttttaaaccaatcaaatgaaaaaaacaaacaaacaaaaaaggaaatgtcatgtgaggttaaaccagtttgcattcccctaatgtggaaaaagtaagaggactactcagcactgtttgaagattgcctcttctacagcttctgagaattgtgttatttcacttgccaagtgaaggaccccctccccaacatgccccagcccacccctaagcatggtcccttgtcaccaggcaaccaggaaactgctacttgtggacctcaccagagaccaggagggtttggttagctcacaggacttcccccaccccagaagattagcatcccatactagactcatactcaactcaactaggctcatactcaattgatggttattagacaattccatttctttctggttattataaacagaaaatctttcctcttctcattaccagtaaaggctcttggtatctttctgttggaatgatttctatgaacttgtcttattttaatggtgggttttttttctggtaagatttagacctaaatcgcatcatgccaacttgtgactttgagactattcatcaagaatgaggatatagtagccatgacatagcttgagctatagcctttaattccttactttggctatgggtggagggtgagtttgaagaggttctgattttcttgtaacctgggaaagccatgaccttgtgcccgattctttcagattgctttgggtaataaatattggtggtggtatctg

SEQ ID NO: 282 - DNA, 350 bp, Homo sapiens
tttttttttttttttttagtcttctctaattttattacagggcatgttggggacacgggagggaagtgttagaggagtgacagggcagcccggggccctctcccaccctgagcctcgaggcctggcgggggacatgaactgcagaggcatcagataaggcctcagaaagcccaggccatcattttccatgggaccaggctggctcaatgtggaactggccctcccagagcagcaggagaagggctcgcatgggctgcccccgtcacctgtgcctgacaggatggcggggaggcagagagagagcatcagacgccctccctccccataaggggcatgggggatggggacac

SEQ ID NO: 283 - DNA, 400 bp, Homo sapiens
  misc_feature: n=a,t,g or c
ncccttgactttatttatcttcataagncacaaaatgtgagtgcagagataaatgtctgtgtgcatgtgccctgagcaacagggtggcataactcggcacactcataatgacacagccgttcacccagccacagntagtgacagggcacacatggcgacacccacatgtacggngntaantctcccccaccatgacatgggtagacagaaaacacgccgcagtntactctagtntgtttacacaaacngggagacaggcccgtgcantgcatgttcaccaacacccacantcagngtgacatctgctggagggtgttcaggacacaggccacccaccgtggacatggccgagntttcacatttnttcacatggacacgggttggtttgccactttcantg

SEQ ID NO: 284 - DNA, 275 bp, Homo sapiens
  misc_feature: n=a,t,g or c
cacctgttgtcttattgacaaacaggtaggccctatagcaacaggcctggaggtcctgcagtagtgggggaaaatggaaggtggagggtggagtttttcctgcaggacagctgagtggagggtggggacaggtgcaaactggagaggcctagagagctagagaagcaagtaagggccagggccagagtcggtttcattggaacaacagcccattncccttaaggccccttaatttttgtcttggcttttttcttagaccccaagccaggtttttt

SEQ ID NO: 285 - DNA, 324 bp, Homo sapiens
  misc_feature: n=a,t,g or c
ccccaatacaatcaatcacctttattcccggttagaacamggccgtgcacactgcagacagaagagcacaagwtcsgggcaatctcacagcaatatacggcgcsggbgggcaggttagtctttttmgattatttcsccttacagagaaactactagactcygcyygaaaagaacccygyctctcttctcccatttnttccatagaacggctccttattctctctctcactctaaygtaacatatcccaaccgsacggacagttcatgctcattccccccacccaattctacacgtatctctctcttcttacgsgagaagccagm

SEQ ID NO: 286 - DNA, 770 bp, Homo sapiens
aggacacctttggattaataatgaaaacaactactctctgagcagctgttcgaatcatctgatatttatactgaatgagttactgtaagtacgtattgacagaattacactgtactttcctctaggtgatctgtgaaaatggttcgctattcacttgacccggagaaccccacgaaatcatgcaaatcaagaggttccaatcttcgtgttcactttaagaacactcgtgaaactgctcaggccatcaagggtatgcatatacgaaaagccacgaagtatctgaaagatgtcactttacagaaacagtgtgtaccattccgacgttacaatggtggagttggcaggtgtgcgcaggccaagcaatggggctggacacaaggtcggtggcccaaaaagagtgctgaatttttgctgcacatgcttaaaaacgcagagagtaatgctgaacttaagggtttagatgtagattctctggtcattgagcatatccaagtgaacaaagcacctaagatgcgccgccggacctacagagctcatggtcggattaacccatacatgagctctccctgccacattgagatgatccttacggaaaaggaacagattgttcctaaaccagaagaggaggttgcccagaagaaaaagatatcccagaagaaactgaagaaacaaaaacttatggcacgggagtaaattcagcattaaaataaatgtaattaaaaagaaaaaaaaaaaaaaaaaaaaaaaaaaaaaaaaaaaaaaaaaaaaaa

SEQ ID NO: 287 - DNA, 1115 bp, Homo sapiens
ctctaaagccgccatggagcgcgcgtcgctgcgcgccctgctcttcggccccgctgggctgctgctcctgctcctgcccctctcctcttcctcctcttcggacacctgcggcccctgcgagccggcctcctgcccgcccctgcccccgctgggctgcctgctgggcgagacccgcgacgcgtgcggctgctgccctatgtgcgcccgcggcgagggcgagccgtgcgggggtggcggcgccggcagggggtactgcgcgccgggcatggagtgcgtgaagagccgcaagaggcggaggggtaaagccggggcagcagccggcggtccgggtgtaagcggcgtgtgcgtgtgcaagagccgctacccggtgtgcggcagcgacggcaccacctacccgagcggctgccagctgcgcgccgccagccagagggccgagagccgcggggagaaggccatcacccaggtcagcaagggcacctgcgagcaaggtccttccatagtgacgccccccaaggacatctggaatgtcactggtgcccaggtgtacttgagctgtgaggtcatcggaatcccgacacctgtcctcatctggaacaaggtaaaaaggggtcactatggagttcaaaggacagaactcctgcctggtgaccgggacaacctggccattcagacccggggtggcccagaaaagcatgaagtaactggctgggtgctggtatctcctctaagtaaggaagatgctggagaatatgagtgccatgcatccaattcccaaggacaggcttcagcatcagcaaaaattacagtggttgatgccttacatgaaatagccagtgaaaaaaggtgaaggtgccgagctataaacctccagaatattattagtctgcatggttaaaagtagtcatggataactacattaccctgttcttgcctaataagtttcttttaatccaatccactaacactttagttatattcactggttttacacagagaaatacaaaataaagatcacacatcaagactatctacaaaaatttattatatatttacagaagaaaagcatgcatatcattaaacaaataaaatactttttatcacaaaaaactttagag

SEQ ID NO: 288 - DNA, 257 bp, Homo sapiens
ttactcttatggtttttattttcctatctgacatttctaacattagccatgtagacggagttaaaaagaatccaccgcacgaaaggtaaacaaagcagaccctcagaaactccctggcaaggaagaacccctccccagattggcccagtttcaccagcaactggtctcagctcagccttatgcctttccactgacaccccccacccctccacattctcgatgattcagaccaggaacttctcggctgattgtgtccg

SEQ ID NO: 289 - DNA, 692 bp, Homo sapiens
cccgcgcaggcgcagacggtggaagcggacgcaacatgccagtggcccggagctgggtttgtcgcaaaacttatgtgaccccgcggagacccttcgagaaatctcgtctcgaccaagagctgaagctgatcggcgagtatgggctccggaacaaacgtgaggtctggagggtcaaatttaccctggccaagatccgcaaggccgcccgggaactgctgacgcttgatgagaaggacccacggcgtctgttcgaaggcaacgccctgctgcggcggctggtccgattgggggtgctggatgagggcaagatgaagctggattacatcctgggcctgaagatagaggatttcttagagagacgcctgcagacccaggtcttcaagctgggcttggccaagtccatccaccacgctcgcgtgctgatccgccagcgccatatcagggtccgcaagcaggtggtgaacatcccgtccttcattgtccgcctggattcccagaagcacattgacttctctctgcgctctcctacgggggttggccgcccgggccgcgtgaagaggaagaatgccaagaagggccagggtggggctggggctggagacgacgaggaggaggattaagtccacctgtccctcctgggctgctggattgtctcgttttcctgccaaataaacaggatcagcgctttaaaa

SEQ ID NO: 290 - DNA, 628 bp, Homo sapiens
  misc_feature: n=a,t,g or c
ggattgcaaaaatttattaaaattggagacactgttttaatcttcttgtgccatgagactccatcaggcagtctacaaagaccactgggaggctgaggatcacttgagcccagaagtttgaggctgtagtaagcttcaaaggccactgcactctagcttgggtgaggcaagaccctttcaagcagtaagctgcatgcttgcttgttgtggtcattaaaaaccctagtttaggataacaggtctgcctgcatttcttcaatcatgaattctgagtcctttgcttctttaaaacttgctccacacagtgtagtcaagccgactctccatacctttaaaaggtatgacaggaactgtcttcatgtccttacccaagcaagtcatccatggataaaaacgttaccaggagcagaaccattaagctggtccaggcaagttggactccaccatttcaacttccagctttctgtctaatgcctgtgtgccaatggttgagttaggcttgctctttaggacttcagtagctattctcatccttccttggggacacaactgtccataangtgctatccagagccacactgcatctgcacccagcaccatacctcacaggagtcgactcgtgccgaat

SEQ ID NO: 291 - DNA, 303 bp, Homo sapiens
  misc_feature: n=a,t,g or c
ttcnntaaacatgtagatttattttaagtcagtttggtacatgatacagattggttttgcngtttttaatgaactganatagaaatgtctnactncngcagtatctgcctgtgcaacaaatatctgtaaggtaaaataaggtatttgatagaagaacatctgcaagaacaaatcagatgaaaaatctgaaaaggtttctatataccttctggattttaaaaaaacccaaaaattnatggctcaaganactacattgcnaaaagttcggggnnaaaagtnnaaaaggctgtgagttcccgttgc

SEQ ID NO: 292 - DNA, 405 bp, Homo sapiens
tttttttgcaggtcagaggctgtttctttatacaaaggcagacaacatggacacctcagcatgctgctgcagttcatgggggcccatcccaccgcttctggggagaggaatcggggtgggggcgcccgcagcaggggagagacactacacaggcctgggaccgccaagcacaccagctgcgagctcctgaagggcagacacatggacacacggacactgaaaccacgagcatggcacagccacagggaggaatggtggagctggggacagacatcggcagctactgccaactgctgccctcttctgccacgagttccttggcgaggagcttgtccgtgttactaaagagccacgtgactttatctgatggcagaacgtctcgctttctgcatctgtaagctgggc

SEQ ID NO: 293 - DNA, 345 bp, Homo sapiens
attttttttttttttttttttttttttttttaaagtctttagtatatttatttgtataaagagtaaacaaagtgcatatagagtggccacaggtttgacacagagaccttggtgatgtaggctatgaacaaatttaaatggcaacttcattgctgccactgaaccaatcctgaatttgggctcaacaggtgaaaagtaacaatatcaaacgaatactaaacagcataacaaaaagattttcagactcttggtcataaagaccgtaatcgttcacattgaatcaatgactaaacatttttgattacccagctacctccaagcaaactgaaaactgtctagtggatc

SEQ ID NO: 294 - DNA, 505 bp, Homo sapiens
ttagtttaatagacatttattccttcagttgaacaacctctacacaattaaaatgtatgacttaagatcttttctttttttgtgaagaaatttaggtctcaagaacttttatgaacttgctatgagtacttcctggaaatcaattaactgagtcttttgaaacccctagagaagataggagaaaattggttcagaacgagcatttaaattaagtcagcaaagtcagaatttaaaattgggcaattccttgtctacattttctttacactcaaattgaccctggacaacagtagtctagtctcctggaagacatggtgcaaacagaaatgcaatgtggtggtatactcatagtcaaagtgggtgcacaagtgatggtccaactttgtggaatggtaaggatttttagggttgtttggccagaacaagagaaataactgcagaaaacacatatggttggaaacatgcgcttgtgactttttctgtagcctatgggagtggacagagt

SEQ ID NO: 295 - DNA, 261 bp, Homo sapiens
  misc_feature: n=a,t,g or c
agtannataccacagagaatagttgggatgaaaggcatccagcccctgcttcctttaagatggcctctaggcaggtgggtgttctgtaagcctggcaaaaattctggagccaatctctggcaaggctgagtgccaggcggggcctagggacccagggtcggtgcttaatgcctcccgcccattggaaattactgacctccaaatatatatatatatatgttttttaatttaaaggggaagtacactgcacaccttcctcca

SEQ ID NO: 296 - DNA, 359 bp, Homo sapiens
  misc_feature: n=a,t,g or c
gaagcttttatcaactttaattgatataatnatnntnggtatgcantatgtcntgcaacaaatgtggatacaatgacatcanntatcaaagaattttcccacctttccatctttaaatgacttcagctaacttaccccaagagaaaaatctggcattgatctcttggttagcattattaccaatatcaactagcactattaaaatcaaagttgaaatggtacattcatttgccaaaaaaaaaaaaaagaaaaaaaaggcttaaaggcaaagaaggtgaatcaacgtgcaaattagcatctggcccaattgcaaaattcatttcctgggatgtgagggattgaaccatgcacacttggca

SEQ ID NO: 297 - DNA, 458 bp, Homo sapiens
aaaatttgaacaagtatttatttcttaaaatttacttaagggattagagctaatatataatagaacatttaatataacatttggagttatgtcaacataaaaatagctgtggttacaattagcacatgcaattcactgcaaaggtaaaaatacatgctatactctagacaagccttccaaatgaagttagagtagatggggtaaaacagcaagtgaacatgaaaggattgcacttagaagaaagtgggacatagctaggatataaaagaaacatacctaatgctagtcagtcactgcattgtcctactagcaaattgcacatttatttttagagtatattcaatacacatacatatttgagactagagaattttcaaatatctacctttgaaatatccctttggtttctaacacatcacattatggtattaatgtaacagcacttaaaacctgtagtt

SEQ ID NO: 298 - DNA, 438 bp, Homo sapiens
gactgctacattttactttattttgttgtaaggaaaaccaattgactaagttgtccccaaaatgttagtgttcactgatcaagaaggaaatgaggtcagaaggcaaacttttcacttcttctcaaacataaattgcaagtatcacagaaaattgtaacaacacatgcaacacgggatggctttcaacacacagagagcctaagcaagaagagtgagtactgaaggtctacagaggtcagactgggagcactaccacaggaagtttgaatctatccacgcagctctttcctcccacagtccaggctcaacacctcttcctattccaaggtggcttatccatatgcagaaatccaggctgttccatatacattaatacttgcccagctgtgtttcacgaggcatctccataagccaagccccgactcaaattctgtacag

SEQ ID NO: 299 - DNA, 2717 bp, Homo sapiens
cagggtaacgctgtcttgtggacccgcacttcccacccgagacctctcactgagcccgagccgcgcgcgacatgagccacgggaagggaaccgacatgctcccggagatcgccgccgccgtgggcttcctctccagcctcctgaggacccggggctgcgtgagcgagcagaggcttaaggtcttcagcggggcgctccaggaggcactcacagagcactacaaacaccactggtttcccgaaaagccgtccaagggctccggctaccgctgcattcgcatcaaccacaagatggaccccatcatcagcagggtggccagccagatcggactcagccagccccagctgcaccagctgctgcccagcgagctgaccctgtgggtggacccctatgaggtgtcctaccgcattggggaggacggctccatctgcgtcttgtacgaggaggccccactggccgcctcctgtgggctcctcacctgcaagaaccaagtgctgctgggccggagcagcccctccaagaactacgtgatggcagtctccagctaggcccttccgcccccgccctgggcgccgccgtgctcatgctgccgtgacaacaggccaccacatacctcaacctggggaactgtatttttaaatgaagagctatttatatatattatttttttttaagaaaggaggaaaagaaaccaaaagttttttttaagaaaaaaaatccttcaagggagctgcttggaagtggcctccccaggtgcctttggagagaactgttgcgtgcttgagtctgtgagccagtgtctgcctataggagggggagctgttagggggtagacctagccaaggagaagtgggagacgtttggctagcaccccaggaagatgtgagagggagcaagcaaggttagcaactgtgaacagagaggtcgggatttgccctgggggaggaagagaggccaagttcagagctctctgtctcccccagccagacacctgcatccctggctcctctattactcaggggcattcatgcctggacttaaacaatactatgttatcttttcttttatttttctaatgaggtcctgggcagagagtgaaaaggcctctcctgattcctactgtcctaagctgcttttcttgaaatcatgacttgtttctaattctaccctcaggggcctgtagatgttgctttccagccaggaatctaaagctttgggttttctgagggggggaggagggaactggaggttattggggttaggatggaagggaactctgcacaaaacctttgctttgctagtgctgctttgtgtgtatgtgtggcaaataatttgggggtgatttgcaatgaaattttgggacccaaagagtatccactggggatgttttttggccaaaactcttccttttggaaccacatgaaagtcttgatgctgctgccatgatccctttgagaggtggctcaaaagctacagggaactccaggtcctttattactgccttcttttcaaaagcacaactctcctctaaccctcccctcccccttcccttctggtcgggtcatagagctaccgtattttctaggacaagagttctcagtcactgtgcaatatgccccctgggtcccaggagggtctggaggaaaactggctatcagaacctcctgatgccctggtgggcttagggaaccatctctcctgctctccttgggatgatggctggctagtcagccttgcatgtattccttggctgaatgggagagtgccccatgttctgcaagactacttggtattcttgtagggccgacactaaataaaagccaaaccttgggcactgttttttctccctggtgctcagagcacctgtgggaaaggttgctgtctgtctcagtacaatccaaatttgtcgtagacttgtgcaatatatactgttgtgggttggagaaaagtggaaagctacactgggaagaaactcccttccttcaatttctcagtgacattgatgaggggtcctcaaaagacctcgagtttcccaaaccgaatcaccttaagaaggacagggctagggcatttggccaggatggccaccctcctgctgttgccccttagtgaggaatcttcaccccacttcctctacccccaggttctcctccccacagccagtcccctttcctggatttctaaactgctcaattttgactcaaaggtgctatttaccaaacactctccctacccattcctgccagctctgcctccttttcaactctccacattttgtattgccttcccagacctgcttccagtctttattgctttaaagttcactttgggcccacagacccaagagctaattttctggtttgtgggttgaaacaaagctgtgaatcactgcaggctgtgttcttgcatcttgtctgcaaacaggtccctgcctttttagaagcagcctcatggtctcatgcttaatcttgtctctcttctcttctttatgatgttcactttaaaaacaacaaaacccctgagctggactgttgagcaggcctgtctctcctattaagtaaaaataaatagtagtagtatgtttgtaagctattctgacagaaaagacaaaggttactaattgtatgatagtgtttttatatggaagaatgtacagcttatggacaaatgtacacctttttgttactttaataaaaatgtagtaggataaaaaaaaa

SEQ ID NO: 300 - DNA, 228 bp, Homo sapiens
ttttttttttttttctcttcaaatatttaatcagtttggagacctctgcattccaatccaattgggtaaaaattctaaagaaagcaagattaaggggtcctcaaagaaaacactgggctaaaatggagaggagactgggtttgggaagacagaacatagcatgtgtctgaaggcctttcgaaggaattctacgacatattttttaaaaatactccaaatgaacaagac

SEQ ID NO: 301 - DNA, 447 bp, Homo sapiens
  misc_feature: n=a,t,g or c
ggaaattcagtaagtactttatttatgagtaaggctgtacaggattcagcagtgtctaattcgggtcccatatagaagttaaaatttttaaatgagtaattcagcttacagggaaatatattttcatctcaatcttttatgctatatcatacctcaggctttttaaaaattatttttgagatgaaattttaaagttcccccggtacccaagtaaccatattatatagtataaagatagtgaaatacaaaaatgtaacaaatactaatacactgtgattaatagctgtttattagctttttaataaagcaaaactttatagtgaaataaactagaaatagctttttattttttatatatatttatttatttttgagatggggtcttgctctgttgcccaggggtggagtgcagtggccaatcntgggtcactgcagcctctgcctcca

SEQ ID NO: 302 - DNA, 5926 bp, Homo sapiens
ccggctgcctctgctgcagttcagagcaacttcaggagcttcccagccgagagcttcaggacgcctttcctgtcccactggcccagttgccacaacaaacaacagagaagacggtgaccatgggggatgtgaagctggttgcctcgtcacacatttccaaaacctccctcagtgtggatccctcaagagttgactccatgcccctgacagaggcccctgctttcattttgccccctcggaacctctgcatcaaagaaggagccaccgccaagttcgaagggcgggtccggggttacccagagccccaggtgacatggcacagaaacgggcaacccatcaccagcgggggccgcttcctgctggattgcggcatccgggggactttcagccttgtgattcatgctgtccatgaggaggacaggggaaagtatacctgtgaagccaccaatggcagtggtgctcgccaggtgacagtggagttgacagtagaaggaagttttgcgaagcagcttggtcagcctgttgtttccaaaaccttaggggatagattttcagcttcagcagtggagacccgtcctagcatctggggggagtgcccaccaaagtttgctaccaagctgggccgagttgtggtcaaagaaggacagatgggacgattctcctgcaagatcactggccggccccaaccgcaggtcacctggctcaagggaaatgttccactgcagccgagtgcccgtgtgtctgtgtctgagaagaacggcatgcaggttctggaaatccatggagtcaaccaagatgacgtgggagtgtacacgtgcctggtggtgaacgggtcggggaaggcctcgatgtcagctgaactttccatccaaggtttggacagtgccaataggtcatttgtgagagaaacaaaagccaccaattcagatgtcaggaaagaggtgaccaatgtaatctcaaaggagtcgaagctggacagtctggaggctgcagccaaaagcaagaactgctccagcccccagagaggtggctccccaccctgggctgcaaacagccagcctcagcccccaagggagtccaagctggagtcatgcaaggactcgcccagaacggccccgcagaccccggtccttcagaagacttccagctccatcaccctgcaggccgcaagagttcagccggaaccaagagcaccaggcctgggggtcctatcaccttctggagaagagaggaagaggccagctcctccccgtccagccaccttccccaccaggcagcctggcctggggagccaagatgttgtgagcaaggctgctaacaggagaatccccatggagggccagagggattcagcattccccaaatttgagagcaagccccaaagccaggaggtcaaggaaaatcaaactgtcaagttcagatgtgaagtttccgggattccaaagcctgaagtggcctggttcctggaaggcacccccgtgaggagacaggaaggcagcattgaggtttatgaagatgctggctcccattacctctgcctgctgaaagcccggaccagggacagtgggacatacagctgcactgcttccaacgcccaaggccaggtgtcctgtagctggaccctccaagtggaaaggcttgccgtgatggaggtggccccctccttctccagtgtcctgaaggactgcgctgttattgagggccaggattttgtgctgcagtgctccgtacgggggaccccagtgccccggatcacttggctgctgaatgggcagcccatccagtacgctcgctccacctgcgaggccggcgtggctgagctccacatccaggatgccctgccggaggaccatggcacctacacctgcctagctgagaatgccttggggcaggtgtcctgcagcgcctgggtcaccgtccatgaaaagaagagtagcaggaagagtgagtaccttctgcctgtggctcccagcaagcccactgcacccatcttcctgcagggcctctctgatctcaaagtcatggatggaagccaggtcactatgactgtccaagtgtcagggaatccaccccctgaagtcatctggctgcacaatgggaatgagatccaagagtcagaggacttccactttgaacagagaggaactcagcacagcctttggatccaggaagtgttcccggaggacacgggcacgtacacctgcgaggcctggaacagcgctggagaggtccgcacccaggccgtgctcacggtacaagagcctcacgatggcacccagccctggttcatcagtaagcctcgctcagtgacagcctccctgggccagagtgtcctcatctcctgcgccatagctggtgacccctttcctaccgtgcactggctcagagatggcaaagccctctgcaaagacactggccacttcgaggtgcttcagaatgaggacgtgttcaccctggttctaaagaaggtgcagccctggcatgccggccagtatgagatcctgctcaagaaccgggttggcgaatgcagttgccaggtgtcactgatgctacagaacagctctgccagagcccttccacgggggagggagcctgccagctgcgaggacctctgtggtggaggagttggtgctgatggtggtggtagtgaccgctatgggtccctgaggcctggctggccagcaagagggcagggttggctagaggaggaagacggcgaggacgtgcgaggggtgctgaagaggcgcgtggagacgaggcagcacactgaggaggcgatccgccagcaggaggtggagcagctggacttccgagacctcctggggaagaaggtgagtacaaagaccctatcggaagacgacctgaaggagatcccggccgagcagatggatttccgtgccaacctgcagcggcaagtgaagccaaagactgtgtctgaggaagagaggaaggtgcacagcccccagcaggtcgattttcgctctgtcctggccaagaaggggacttccaagacccccgtgcctgagaaggtgccaccgccaaaacctgccaccccggattttcgctcagtgctgggtggcaagaagaaattaccagcagagaatggcagcagcagtgccgagaccctgaatgccaaggcagtggagagttccaagcccctgagcaatgcacagccttcagggcccttgaaacccgtgggcaacgccaagcctgctgagaccctgaagccaatgggcaacgccaagcctgccgagaccctgaagcccatgggcaatgccaagcctgatgagaacctgaaatccgctagcaaagaagaactcaagaaagacgttaagaatgatgtgaactgcaagagaggccatgcagggaccacagataatgaaaagagatcagagagccaggggacagccccagccttcaagcagaagctgcaagatgttcatgtggcagagggcaagaagctgctgctccagtgccaggtgtcttctgaccccccagccaccatcatctggacgctgaatggaaagaccctcaagaccaccaagttcatcatcctctcccaggaaggctcactctgctccgtctccatcgagaaggcactgcctgaggacagaggcttatacaagtgtgtagccaagaatgacgctggccaggcggagtgctcctgccaagtcaccgtggatgatgctccagccagtgagaacaccaaggccccagagatgaaatcccggaggcccaagagctctcttcctcccgtgctaggaactgagagtgatgcgactgtgaaaaagaaacctgcccccaagacacctccgaaggcagcaatgccccctcagatcatccagttccctgaggaccagaaggtacgcgcaggagagtcagtggagctgtttggcaaagtgacaggcactcagcccatcacctgtacctggatgaagttccgaaagcagatccaggaaagcgagcacatgaaggtggagaacagcgagaatggcagcaagctcaccatcctggccgcgcgccaggagcactgcggctgctacacactgctggtggagaacaagctgggcagcaggcaggcccaggtcaacctcactgtcgtggataagccagaccccccagctggcacaccttgtgcctctgacattcggagctcctcactgaccctgtcctggtatggctcctcatatgatgggggcagtgctgtacagtcctacagcatcgagatctgggactcagccaacaagacgtggaaggaactagccacatgccgcagcacctctttcaacgtccaggacctgctgcctgaccacgaatataagttccgtgtacgtgcaatcaacgtgtatggaaccagtgagccaagccaggagtctgaactcacaacggtaggagagaaacctgaagagccgaaggatgaagtggaggtgtcagatgatgatgagaaggagcccgaggttgattaccggacagtgacaatcaatactgaacaaaaagtatctgacttctacgacattgaggagagattaggatctgggaaatttggacaggtctttcgacttgtagaaaagaaaactcgaaaagtctgggcagggaagttcttcaaggcatattcagcaaaagagaaagagaatatccggcaggagattagcatcatgaactgcctccaccaccctaagctggtccagtgtgtggatgcctttgaagaaaaggccaacatcgtcatggtcctggagatcgtgtcaggaggggagctgtttgagcgcatcattgacgaggactttgagctgacggagcgtgagtgcatcaagtacatgcggcagatctcggagggagtggagtacatccacaagcagggcatcgtgcacctggacctcaagccggagaacatcatgtgtgtcaacaagacgggcaccaggatcaagctcatcgactttggtctggccaggaggctggagaatgcggggtctctgaaggtcctctttggcaccccagaatttgtggctcctgaagtgatcaactatgagcccatcggctacgccacagacatgtggagcatcggggtcatctgctacatcctagtcagtggcctttcccccttcatgggagacaacgataacgaaaccttggccaacgttacctcagccacctgggacttcgacgacgaggcattcgatgagatctccgacgatgccaaggatttcatcagcaatctgctgaagaaagatatgaaaaaccgcctggactgcacgcagtgccttcagcatccatggctaatgaaagataccaagaacatggaggccaagaaactctccaaggaccggatgaagaagtacatggcaagaaggaaatggcagaaaacgggcaatgctgtgagagccattggaagactgtcctctatggcaatgatctcagggctcagtggcaggaaatcctcaacagggtcaccaaccagcccgctcaatgcagaaaaactagaatctgaagaagatgtgtcccaagctttccttgaggctgttgctgaggaaaagcctcatgtaaaaccctatttctctaagaccattcgcgatttagaagttgtggagggaagtgctgctagatttgactgcaagattgaaggatacccagaccccgaggttgtctggttcaaagatgaccagtcaatcagggagtcccgccacttccagatagactacgatgaggacgggaactgctctttaattattagtgatgtttgcggggatgacgatgccaagtacacctgcaaggctgtcaacagtcttggagaagccacctgcacagcagagctcattgtggaaacgatggaggaaggtgaaggggaaggggaagaggaagaagagtgaaacaaagccagagaaaagcagtttctaagtcatattaaaaggactatttctctcaaaatcca

SEQ ID NO: 303 - DNA, 161 bp, Homo sapiens
  misc_feature: n=a,t,g or c
tcacaattgtnaggntattttattggccccatgacatccagtgacagtgtgggagcaggctactctccagggacatgtttttggaggcatatggagaagggggcccaggcgaggtggctcacacctgtaatcccagcactttgggaggtcgaggtgggagg

SEQ ID NO: 304 - DNA, 358 bp, Homo sapiens
ttttggcttttaaaataacctttattttttaaaagttagtatgtgcattataggaaattgaaaaacacaagcaaagaacaaagtcattcacaatcacaagcagtttatagtttgacatattcttctagatcctgtgtgtaggcacaacatccaattttatgggactgagactgtacagtatgtatcatgatttttcacacatcatgaatatttaccaattcaaaatcccaaagctatatgagtattctgataaccaagagtacactacaccaactcaaactgctaaaaaaaaaaaaaaagatgtaatcctgcctttcttgggacagaaatttcatataagacaaaaatggcaacatgc

SEQ ID NO: 305 - DNA, 316 bp, Homo sapiens
gtgatacagtctagtgtttattttatgttatggaaggtacacttgaatttcaaaaatttaaaacatatataavmvgbggttagggactaacatttgtatcamcagttgataaatgtctaagattgtttattatacagcagggtacaatggtagtgctaatgccaacagggcaccatggaagttagtctaaaaattatcgctaggctttatacaagcacaacatatgctgctgctcttagaatttbgggaaatgayctgcttctaatactaagcmgttctttmacattttbmmatgttatacagtgttacagtattt

SEQ ID NO: 306 - DNA, 344 bp, Homo sapiens
  misc_feature: n=a,t,g or c
ttttttttttttttttttttttttgtggnggagctagctgaggttttattttggaccaaaaaaaaaatnacaattnttttctagctggaagcatgggcaaggggggtccccagacagtaaactcccccacgggtgggttgagcctcaggtggggggtctcctgttgtctgtgcttccccacacagcagcctccctcctggngtntntggcagccacgggaggggcagtactaggaggagctgccacanttnttcacttgggcaggaagtcagaggactcagacaccagnttcccatcgcgggtttcgatcttcttcanaaccacggccctggtggagntggtgc

SEQ ID NO: 307 - DNA, 852 bp, Homo sapiens
tctctctctctctctctctctctggtgaacaggacccgtcgccatgggccgtgtgatccgtggacagaggaagggcgccgggtctgtgttccgcgcgcacgtgaagcaccgtaaaggcgctgcgcgcctgcgcgccgtggatttcgctgagcggcacggctacatcaagggcatcgtcaaggacatcatccacgacccgggccgcggcgcgcccctcgccaaggtggtcttccgggatccgtatcggtttaagaagcggacggagctgttcattgccgccgagggcattcacacgggccagtttgtgtattgcggcaagaaggcccagctcaacattggcaatgtgctccctgtgggcaccatgcctgagggtacaatcgtgtgctgcctggaggagaagcctggagaccgtggcaagctggcccgggcatcagggaactatgccaccgttatctcccacaaccctgagaccaagaagacccgtgtgaagctgccctccggctccaagaaggttatctcctcagccaacagagctgtggttggtgtggtggctggaggtggccgaattgacaaacccatcttgaaggctggccgggcgtaccacaaatataaggcaaagaggaactgctggccacgagtacggggtgtggccatgaatcctgtggagcatccttttggaggtggcaaccaccagcacatcggcaagccctccaccatccgcagagatgcccctgctggccgcaaagtgggtctcattgctgcccgccggactggacgtctccggggaaccaagactgtgcaggagaaagagaactagtgctgagggcctcaataaagtttgtgtttatgcca

SEQ ID NO: 308 - DNA, 942 bp, Homo sapiens
ctttccgctcggctgttttcctgcgcaggagccgcagggccgtaggcagccatggcgcccagccggaatggcatggtcttgaagccccacttccacaaggactggcagcggcgcgtggccacgtggttcaaccagccggcccgtaagatccgcagacgtaaggcccggcaagccaaggcgcgccgcatcgccccgcgccccgcgtcgggtcccatccggcccatcgtgcgctgccccacggttcggtaccacacgaaggtgcgcgccggccgcggcttcagcctggaggagctcagggtggccggcattcacaagaaggtggcccggaccatcggcatttctgtggatccgaggaggcggaacaagtccacggagtccctgcagaccaacgtgcagcggctgaaggagtaccgctccaaactcatcctcttccccaggaagccctcggcccccaagaagggagacagttctgctgaagaactgaaactggccacccagctgaccggaccggtcatgcccgtccggaacgtctataagaaggagaaagctcgagtcatcactgaggaagagaagaatttcaaagccttcgctagtctccgtatggcccgtgccaacgcccggctcttcggcatacgggcaaaaagagccaaggaagccgcagaacaggatgttgaaaagaaaaaataaagccctcctggggacttggaatcagtcgggcagtcatgctgggtctccacgtggtgtgtttcgtgggaacaactgggcctgggatggggcttcactgctgtgacttcctcctgccaggggatttggggctttcttgaaagacagtccaagccctggataatgctttactttctgtgttgaagcactgttggttgtttggttagtgactgatgtaaaacggttttcttgtggggaggttacagaggctgacttcag

SEQ ID NO: 309 - DNA, 309 bp, Homo sapiens
gggtagactgcagtcctccatcctagctttcggtcacacccctcaggactccccagggctgaagctgggatcccggccagccaggtgacccccacgctctggatgtctctgctctgttccttccccgagcccctgccccggctccccgccaaagcacccctgcccactcgggcttcatcctgcacaataaactccggaagcaagtcagtctggctcctggctgtctgcgctgtcatcacccgtcctgggcctggcctggccacccggacctccccctctaaaatctcagcctgacgtcaacaaaggaac

SEQ ID NO: 310 - DNA, 459 bp, Homo sapiens
  misc_feature: n=a,t,g or c
aagactaaacagatttttattttatttcatctgctaaatgtcagagagcaagttagacacacattccactaagcatcaaaggccctcgtagtctcggtggaaggacaaactccagctccacatcactggtttaagtttcttcctcttcttcttcctcttcttcctcctcctcttcctcctcatcttcatcagagctgaaggtgccatcagggaggctgtagacacggatgacctgcttgttggggtccttgaggatgaggtatttgccctcctccagcttcatgcagatgtcaatgacgcagcgtaaaatgccccagggatttctccacgctcaggttgatctgggctggcaaactcattaggcttgaactgctgggtgcctagggtgacgtggcntgaggagtctttcacgtggtaccgagacacataaccaaggttgaggtactcagatccagccag

SEQ ID NO: 311 - DNA, 365 bp, Homo sapiens
ctgtaatagtcagcatgacctctattttattgattgattgatggattgattgagacagagtttcactcttgttgcctaagctggagtgcaatggcacggtttcagctcactgcaacctcggtctcccaggttcaagcgattctcctgcctcacactcccaagcagctgggattacaggtacccgccaccatgccaagctaatttttgtatttttagtagagacggggtttcaccatgttggtcaggctggtctcaaactcctgacctcaggtgactgcccaccttggcctcccaaagtgctgggattataggtgtgagcaccacacccgaccagcatgacctttaaacacaattggacttaagac

SEQ ID NO: 312 - DNA, 521 bp, Homo sapiens
tcagagttttctttaactttatcatttataaagccatacaatgcattgcaaagaaacaaagcagctgtacaggagtggggacgcgtcagtgtacaatacattcatgtccaggataaggagcatacaccaggatttatacacggtggcagcggctataggcacgatgatacaaaatataaagtatatttccatctatataaatacacagctggggtggggaaggatgctgggtgatcttgtttcccccgcagagggcctgggaggcagggagggtggtgggaagggatttcttacatttgttctcaatgatgggtctgaagggaggagagaaatggggaaacacagcctgcacacactggatgtgctctcacacacacgcacaaacaaaacacagacacaggagagtttcaaacagcttaacactgattggaaaacaagcttggggacatccctctacagtaactccactgctggcaagagcccaggcgtgggatatgaacagaggtcctccaacattttgg

SEQ ID NO: 313 - DNA, 442 bp, Homo sapiens
  misc_feature: n=a,t,g or c
ggaaatatttatttgataagatggaaataaattaataagctgagattcattgaaattcaacattttaaaaatcaaagtaagatataaaatgggagaaaatattgaaaatacataggatatgtatctttttatatttnttgtactttaagttttagggtacatgtgcacaacgtacagcttagttacacatgtatacatgtgccgtgttggtgtgctgcacccattaactcgtcatttaacatcaggtatatctcctaatgctatccctccccgntcaccccaccccacaacaggccccggtgtgtgatgttccccttcctgtgtccatgtgttctcattgttcantttccacctatgaatataaggtttcttacaagtcaatgaggggntaaacccattaaaanttgggcaaaaggcttaaacctttccaantagggnaatt

SEQ ID NO: 314 - DNA, 374 bp, Homo sapiens
tttttttttttttttttaatatctcaaaaaggaagccacttgcttgatatcaaaagtgctgtggaaagaaaggaggggaaaaaaacccacaaataaatgtagaatctagtttattttaccaaactgtatatttttccacttaacatttctacattagcaatgatgtaactctccaacatttccttataaaaaaggcaaacaagaagtgacaactcatgctccaaatattaaaaaatatatttaaacatatgatcaagaagatttgggccgtgagtggtagctcacatctgtaaccccaggattttgggaggctgaggtgagtggatcacgaggtcaggagatcgagaccatcctggctaacatggtgaaacccc

SEQ ID NO: 315 - DNA, 115 bp, Homo sapiens
  misc_feature: n=a,t,g or c
ttttttttttttttgacctggagnagaattctttttattacgagtgaacagatggaactaaggtaagcgggtctcagccttccgctggtgcagcatctccacgcagggcctcagc

SEQ ID NO: 316 - DNA, 142 bp, Homo sapiens
ccagataatcttggtttattatttctataattgtcacatccaaactggcacaggcaaggaggaccaagtgtgttttccccttctctgtgttgccaatctttctctctctctccctctccctccctcccctcccctttcctcc

SEQ ID NO: 317 - DNA, 441 bp, Homo sapiens
actcccactctgatgtcccgtgcctggcatcttctgctttgaactgtaacccacactgattgtcccctctgtttcctttcacagaaagcattctgctctttccagatctacgctgtgccttggcagggcacaatgaccttgtcgaaatccacctgtcaggacgcctaggggtctgtaccgggctggcctgtgcctatcacctcttatgcacacctcccaccccctgtattcccacccctggactggtggcccctgccttggggaaggtctccccatgtgcctgcaccaggagacagacagagaaggcagcaggcggcctttgttgctcagcaaggggctctgccctccctccttccttcttgcttctcatagccccggtgtgcggtgcatacacccccacctcctgcaataaaatagtagcatcgtcctctgagtctggcg

SEQ ID NO: 318 - DNA, 407 bp, Homo sapiens
ttactgttatcactacaaattttattcagaaacccatctttgtatgtttttttttttgttgttttttaaaaaaaattccccttatgaactggtttggtcaatcaactacaacactttctagcagacataaggtaaaaatggcatggctcagaatcgcccagatctttcacgatctctcgaccgcctcctgtcacgctcccgtccgccgccacctccaccaccgccaccgccaccgccacgaccacggtctctagaccgagaacgacgctcccgggatcggaatcttgatctatgcttcttgcgacggcggccatacagctcccgccgcagctctctgggaaatgggcttcaaatgcatgaagttgcagaagccgcctcgtgtgcattctcccatctcatactgacgg

SEQ ID NO: 319 - DNA, 473 bp, Homo sapiens
tctgttcaaaacagtttattttattttatttttttttttgtcagacaaacacattgatttctggaccacagtagaggatggaaacctttcacaaacttatttatttgaaaatacaaatataaaattatactttccacatctgtgatgtgagagactgccatccacatagtaattttttacaacagggctttaagaaagccacacacaaagacctgaaagatgcttgagatatatatatagatagtacatatatatgtatatatataaaaaaaatactcactaccaaagttctcatcagtttcatactaaagtataaaagtaagggtgaggtcagccacagtgctagggaaagttttatttagatacatttatgtccacatgaaacgcttagacttgcatcctattacatatggaattcggagtttacaatacaccatgaacggcagattggctagcccacgctacttaagagg

SEQ ID NO: 320 - DNA, 1120 bp, Homo sapiens
acttcttcgcaccagggaagccccacccaccagaacgccaagatgtccagcaagcgggccaaagccaaggccaccaagaagcggccacagcgggccacatccaatgtcttcgcaatgtttgaccagtcccagatccaggagtttaaggaggctttcaacatgattgaccagaaccgtgatggcttcattgacaaggaggacctgcacgacatgctggcctcgctggggaagaaccccacagacgaatacctggagggcatgatgagcgaggccccggggccatacaacttcaccatgttcctcaccatgtttggggagaagctgaacggcacggaccccgaggatgtgattcgcaacgcctttgcctgcttcgacgaggaatcctcaggtttcatccatgaggaccacctccggaagctgctcaccaccatgggtgaccgcttcacagatgaggaagtggacgagatgtaccgggaggcacccgttgataagaaaggcaacttcaactacgtggagttcacccgcatcctcaaacatggcgccaaggataaacacgactaggccatccccagccccctgacacccagcccccgccagtcacccctccccgcacacacccgtccataccagctccctgcccatgaccctcgctcagggatccccctttgagggttagggtcccagttcccagtggaagaaacaggccaggagagtgcgtgccgagctgaggcagatgttcccacagtgaccccagagccctgggctatagtctctgacccctccaaggaaagaccaccttctggggacatgggctggagggcaggacctagaggcaccaagggaaccgcattccggggctgttccccgaggaggaagggaagcctctgtgtgccccccaggaggaagaggccctgagtcctgggatcagacaccccttcacgtgtatcccacacaaatgcaagctcaccaaggtcccctctcagtccccttccctacaccctgacgccagatgccgcacacccaacgccaccagccatgggagtgtgctcaggagtcgcggggcagacgtgacatctgtccagagggggcagaatctccaatagaggactgagacaacatg

SEQ ID NO: 321 - DNA, 249 bp, Homo sapiens
tttacaggcatgagccactgtgcctggcccctttatttgataatttacacatacatttttgtccaaaactcttctttatttcaagatgatgtttctgtggctatgtgtggtatgtggtataaatctcaatctatggtcacacgaggggcattttccttgttgtaagtgtagtctaaaccagtaggaaggaggtttaattgccaaaaccagcgagaactcgggcactgtggatactacagtgggcagctg

SEQ ID NO: 322 - DNA, 2167 bp, Homo sapiens
ctgcaggaaccaatacccataggctatttgtataaatgggccatggggcctcccagctggaggctggctggtgccacgagggtcccacaggcatgggtgtccttcctatatcacatggccttcactgagactggtatatggattgcacctatcagagaccaaggacaggacctccctggaaatctctgaggacctggcctgtgatccagttgctgccttgtcctcttcctgctatgtcatggcttatcttctttcacccattcattcattcattcattcattcagcagtattagtcaatgtctcttgatatgcctggcacctgctagatggtccccgagtttaccattagtggaaaagacatttaagaaattcaccaagggctctatgagaggccatacacggtggacctgactagggtgtggcttccctgaggagctgaagttgcccagaggcccagagaaggggagctgagcacgtttgaaccactgaacctgctctggacctcgcctccttccttcggtgcctcccagcatcctatcctctttaaagagcaggggttcagggaagttccctggatggtgattcgcaggggcagctcccctctcacctgccgcatgactaccccgccccatctcaaacacacaagctcacgcatgcgggactggagcccttgaggacatgtggcccaaagacaggaggtacaggggctcagtgcgtgcagtggaatgaactgggcttcatctctggaagggtaaggggccatcttccgggttcaccgccgcatccccacccccggcacagcgcctcctggcgactaacatcggtgacttagtgaaaggactaagaaagacccgaggcgaggccggaacaggccgatttctagccgccaagtggagaacaggttggagcggtgcgccgggcttagcggcggttgctggaggaacgggcggagtcgcccagggtcctgccctgcgggggtcgagccgaggcaggcggtgacttccccactcggggcggagccgcagcctcgcgggggcggggcctggcgccggcggtggcgtcacaaaaggcgggaccacagtggtgtccgagaagtcaggcacgtagctcagcggcggccgcggcgcgtgcgtctgtgcctctgcgcgggtctcctggtccttctgccatcatgccgatgttcatcgtaaacaccaacgtgccccgcgcctccgtgccggacgggttcctctccgagctcacccagcagctggcgcaggccaccggcaagcccccccaggtttgccgggaggggacaggaagaggggggtgcccaccggacgaggggttccgcgctgggagctggggaggcgactcctgaacggagctggggggcggggcggggggaggacggtggctcgggcccgaagtggacgttcggggcccgacgaggtcgctggggcgggctgaccgcgccctttcctcgcagtacatcgcggtgcacgtggtcccggaccagctcatggccttcggcggctccagcgagccgtgcgcgctctgcagcctgcacagcatcggcaagatcggcggcgcgcagaaccgctcctacagcaagctgctgtgcggcctgctggccgagcgcctgcgcatcagcccggacaggtacgcggagtcgcggaggggcgggggaggggcggcggcgcgcggccaggcccgggactgagccacccgctgagtccggcctcctccccccgcagggtctacatcaactattacgacatgaacgcggccaatgtgggctggaacaactccaccttcgcctaagagccgcagggacccacgctgtctgcgctggctccacccgggaacccgccgcacgctgtgttctaggcccgcccaccccaaccttctggtggggagaaataaacggtttagagactaggagtgcctcggggttccttggcttgcgggaggaattggtgcagagccgggacattggggagcgaggtcgggaaacggtgttgggggcgggggtcagggccgggttgctctcctcgaacctgctgttcgggagcccttttgtccagcctgtccctcctacgctcctaacagaggagccccagtgtctttccattctatggcgtacgaagggatgaggagaagttggcactctgccctgggctgcag

SEQ ID NO: 323 - DNA, 419 bp, Homo sapiens
ttttttttgttttagaggcattttatttagacaactaaaaacaattagatgttcagaggcagtgtacaatgaacgagaaatcaaaccagttactttatcatgtattccctcttctttacaactgaagcaaaaaaagaaaaggcattctgctttaagatcagaaaaaatcagccaatatagttttcttctccatattaacataaacagctacaagaaccctaattgtaataatagaaattggatgttggcttgtatatattcattaaaaagataacaggccactgtactataagaggataactccacctcccttcatctgacacttgagttttcacttacaggtaacaccaagttagttagttgttccagcactggagctaattcattttcctcattatttactgctgtttctgccttaa

SEQ ID NO: 324 - DNA, 435 bp, Homo sapiens
caacataaactccaacttcactgaggtggctgaccacgtccacgaccaaagccgcctctaaactggaactcagtggctgagccagccccagcctcagctttcttgtcagctccagggggcacagcgctccttctgtaggtgtctctgtcagcctcccctcttgtgaatcttgcaggtcgctcaccctctggacctttgggccgaggcatgccggtctcgggacggctgcgacgcaggggtggcgggcacgatctccgggggtaggtgcaggtagtctcggagatactggatgccctcgttcgtaaggtaccagtagaaatgtctccaagcaaactgttccttcacgtagcctcgagacttgagagactgcatggccttcattacatgaaggttgggcacatttttgtctgccagctccgggtgcttaggcatgtg

SEQ ID NO: 325 - DNA, 430 bp, Homo sapiens
gaacaaacagcatgcactgtggtatcctttatttaaaaattgtgagctgactacagttgtagtgttctcatttaccattctgatggcataataaaccaagagaacattaacacaattccaagaaggcattaacctgtaacacacatatacgccacacatgcacacacacaacatacacgcacacaaaggttatattctgaacacaaaagtgatagaaaaaagctttgaatgcgctaaatcaaataaaaaccctttattataataaactgtggcaatactgtggctatcatgaaaaatattgtaactattttaaaagcaaaaggaaaaatactggcagtttgaaactagcagcaaaaagcagataaaaatagaatggaagataacataagactaatatcaaaattctaatgttgatactgtgtaggattgc

SEQ ID NO: 326 - DNA, 325 bp, Homo sapiens
ctttttaattgtttaactttattactgttgcaccatttatacaattacatataattycaatgcatccattgtacatttbtbbgttttttttttgttttttttttccattttccaatgrgtggtgtgttggkgtctgtsacacagaatggaagagaaactggaactgcaatgaacgsagacttttttttttttttttttcatttccactgmccaataaacagaactacaggkgcacccaaccacggacatgcattaactcgtcatgrgaaatctaggtaggctaagtctcgtgccgaattcctgcagcccgggggayccactagtt

SEQ ID NO: 327 - DNA, 292 bp, Homo sapiens
acagattttggcttttattctggccatcacacatctacttctaagacaacacagaccggcagtaccccatcccccatgaccactgtcacaaccccaatttcctcagccccctcctcccaccccaccccttctgccaagctccccgtatggtgctctgcctacacctcaccccgggcatgcagcatgaagtgcccgtgcagcgtggggttcccggtggggcctccccaaggggtgagcggccacagagctggcaaggctgggccgagggctgggctgcacggggggcccggcg

SEQ ID NO: 328 - DNA, 1797 bp, Homo sapiens
ccagcagggagctgggagctgggggaaacgacgccaggaaagctatcgcgccagagagggcgacgggggctcgggaagcctgacagggcttttgcgcacagctgccggctggctgctacccgcccgcgccagcccccgagaacgcgcgaccaggcacccagtccggtcaccgcagcggagagctcgccgctcgctgcagcgaggcccggagcggccccgcagggaccctccccagaccgcctgggccgcccggatgtgcactaaaatggaacagcccttctaccacgacgactcatacacagctacgggatacggccgggcccctggtggcctctctctacacgactacaaactcctgaaaccgagcctggcggtcaacctggccgacccctaccggagtctcaaagcgcctggggctcgcggacccggcccagagggcggcggtggcggcagctacttttctggtcagggctcggacaccggcgcgtctctcaagctcgcctcttcggagctggaacgcctgattgtccccaacagcaacggcgtgatcacgacgacgcctacacccccgggacagtacttttacccccgcgggggtggcagcggtggaggtgcagggggcgcagggggcggcgtcaccgaggagcaggagggcttcgccgacggctttgtcaaagccctggacgatctgcacaagatgaaccacgtgacaccccccaacgtgtccctgggcgctaccggggggcccccggctgggcccgggggcgtctacgccggcccggagccacctcccgtttacaccaacctcagcagctactccccagcctctgcgtcctcgggaggcgccggggctgccgtcgggaccgggagctcgtacccgacgaccaccatcagctacctcccacacgcgccgcccttcgccggtggccacccggcgcagctgggcttgggccgcggcgcctccaccttcaaggaggaaccgcagaccgtgccggaggcgcgcagccgggacgccacgccgccggtgtcccccatcaacatggaagaccaagagcgcatcaaagtggagcgcaagcggctgcggaaccggctggcggccaccaagtgccggaagcggaagctggagcgcatcgcgcgcctggaggacaaggtgaagacgctcaaggccgagaacgcggggctgtcgagtaccgccggcctcctccgggagcaggtggcccagctcaaacagaaggtcatgacccacgtcagcaacggctgtcagctgctgcttggggtcaagggacacgccttctgaacgtcccctgcccctttacggacaccccctcgcttggacggctgggcacacgcctcccactggggtccagggagcaggcggtgggcacccaccctgggacctaggggcgccgcaaaccacactggactccggcccccctaccctgcgcccagtccttccacctcgacgtttacaagcccccccttccacttttttttgtatgttttttttctgctggaaacagactcgattcatattgaatataatatatttgtgtatttaacagggaggggaagagggggcgatcgcggcggagctggccccgccgcctggtactcaagcccgcggggacattgggaaggggacccccgccccctgccctcccctctctgcaccgtactgtggaaaagaaacacgcacttagtctctaaagagtttattttaagacgtgtttgtgtttgtgtgtgtttgttctttttattgaatctatttaagtaaaaaaaaaattggttctttattaa

SEQ ID NO: 329 - DNA, 267 bp, Homo sapiens
aggtatgasgctgatgccasgyaagtttttattatatttmgaaaaaaaatgtaactsgaaataaaggtaagtcatttaaaatgaatgagagtttttaaacccctataattctttaatggcagcatttgggtccactgccaagccacttttaacccaaccaagatbgytggaaagcagagcacacagttgtgcccaccavgccaggrgggcgatggmccccagggctcctcgactacgcttgctgggttctcccgtgtaatagccata

SEQ ID NO: 330 - DNA, 231 bp, Homo sapiens
gctgtccttttaaattttaataaaatagattaatttcatattacatagagagcaagtccatccattcatccgtgataaaattttagaaatattttctataaaatgtttagtatttaattggaaatgaatccagtataaacatgactttccacagatacagcattcccatcctcactcccattcctattttgagaatttaaaatacagaaagtacaaaaatagcagatatcc

SEQ ID NO: 331 - DNA, 263 bp, Homo sapiens
cgggcccaaactcgtgttatattatcgaggtggaaaacagccatatgtattaggaggggaaactgaggcagaccacaggacggggctccagagggaggacaactaggcccagaaccccttctggaggctcagagatgccagtgttccaggaggtctcacagcatgaaaggggcctgactacattcgcttttagcagtcggaatggcggatggtcaggcggtggctggaatcacatttacatccttcaaatcagcatcctgggc

SEQ ID NO: 332 - DNA, 2862 bp, Homo sapiens
ctgcagccttgacctcctgggctgaaggctcagcctcccgagtagctgggaattttttgtactttttattcttttatgtccgtgtgtacacaaatttttgtatttttttgtagagaggcagtctcactgtgttgtccttactaactttatatacaaaattttatctgttaaagccggaatggttcttttcacgaggccctgtccctgctccagtatctgtaatgaattctcgtgttcctcccacagtgggacctgaaccgccaaaccgcacctacgagcaaacggtaggcgctccataaatacttgttgatgtgggtgccatcgtgtagatgacggagcacgaacccgaggctcagacaggggcggcgacttgtccaaagtcactccgtggaggaagcggctctgcagacctcaggcggcggctgctctaatccctgcagcctgtgttttgccctccagacggcagagggcgcgtgttcgcgccgggaaagcggaacgcgtgtgcgcgcacggccgagggggcgggacatgccggcagtctcgcgataactgcgcaggcgcggaccaaagcgatctcttctgaggatccggcaagatggtgagtgttgcgatttggcgcgtctctgccgggcctatccggctccatccaacctctgaccgtctcgcgggggccgcagttcgtccccgcggctacggcggcttgctcccgaccctgcaggcggctggatgttggggcgaggggcggacttggtgggtgtcgggacgacgcggggctgggaaggcctgtccggttcttcatgtccgggtcctcgtaacccggagccgcgagtgatccccggggacgggtcgaagcggtgtgtccctgtcgggcttctgtccccggcggcgccgcgcgtcttccgcggtgtcctcgggcccggtggccccgggagatgggtgtcgggatccgctgacgcccgatccgcgcccgcacaggcagaagtagagcagaagaagaagcggaccttccgcaagttcacctaccgcggcgtggacctcgaccagctgctggacatgtcctagtaagggcggccgcgggggtcgcgggcaggggctgggccagcggtggggcttgtccgggtgagggcggcggggcgggggtccaagcgcctctgcggcggtgggcgggcacggtctccgcgcgggtttggaactgagtgtggtcttgcgcccagaaaactgtccagagacgttgaggtttttgcttatttgcaacctgccccccgttgttcacttttccgcggcttagttggaaggtgtagcccctgtctgtagcccacgtgacttagaataaggggctgcgttagactccttagattttaagggcggtggaggtcggctgggtcctttccaggcagggtggtggtgggcatctgcttgcgcttttattttttaatttttgattattttgaggcggagtctcatcctgtcgcccaggctggagtgcaatggctccgtcccagctcactgcagcctcccactcccgggttcaagcgattctcttgcctcagcctctcgagtagctgggattagagggcccccccaccacgtccggctaatttttgtatttttagtagagacgagtttcagtgttgcccaggctggtctcaaactcctgacctcaggtgatccacctgcctcggcctcccaaagtgctgggattacaggcgtgaacaccgcgcccgaccttgatttttgattatttgtggaaacagcgtttctctgtgtcgtccaggttggtcttgaactcctgggctcaagcgaccctcccgcctcaacctcccgaagtgctgggatcacaggcgggagccactgcgccctacctgccttcccctgcgtttttagagcctttggcccgagctgtacgctgcagcaccttgtctgaggctgtggtctccgggccgcttgttctctctgaatctctgcagtcacacggtggctcttgcatgtgaggggtgagtcgcgcatatctggcgggggtgccagagggacttggcgtgttcattgtagtcactacaatggacagtgacaggtccactgcggctctgtccctggagagaaccaagccttagttctctgtccgccggagtgcgtagggtctccccaggccgggccgctcacaaaactgcctggtgcatcctccccagcgagcagctgatgcagctgtacagtgcgcgccagcggcggcggctgaaccggggcctgcggcggaagcagcactccctgctgaagcgcctgcgcaaggccaagaaggaggcgccgcccatggagaagccggaagtggtgaagacgcacctgcgggacatgatcatcctacccgagatggtgggcagcatggtgggcgtctacaacggcaagaccttcaaccaggtggagatcaaggtgtgtgcggccgtccctgccggctggggtgggctggggtcgcctgatgcaggcgggatcactgacacccagctttgctcttggtctcccgcagcccgagatgatcggccactacctgggcgagttctccatcacctacaagcccgtaaagcatggccggcccggcatcggggccacccactcctcccgcttcatccctctcaagtaatggctcagctaataaaggcgcacatgactccagtcctttgcgcacgttgttcttcctggcgtcccgagctctgggaggggcctgggcctgcttcaggttcgtggtgtgaggaggttcaggttggacgttcgggggtgtgtggtagtgttgtgtggatggtctctgtggtgtcgaagacatgacagctagtgcgggccctgccccaactcggctgcccctgctcctgtctgcag

SEQ ID NO: 333 - DNA, 335 bp, Homo sapiens
agctttatttggcatggaacctaaaatagaagataagatcttgatattctgtacaagttgatgtaataccctgatgcgttttagaggacttggcataaaatgaaagattggcaaaggcccttgagggcttggggatgagagtatggaactgtctgcattggaccctaaactggactagaagaggcatcttcaaggttcatacgttgtccagctgtaagttcatttgagtagcagacctaacaaatatttgaggtcaaaaccctaccatgttaaaacaaacaaaaacttaccatgttaataaaagtattcatttgcttgaaaagacgaaagaccta

SEQ ID NO: 334 - DNA, 526 bp, Homo sapiens
tatggtgccaattttaaatagttttatttaagacattgcattttccacttacaatacagtgtttataaagtgcaatgttatttccttcccctgtgcatatgttccatattcaagtattgagaatgcccagtaacttactatagcagcttaactttttaaaactgccacagaatttgctacgaatttaggtccttcaaatgttttaaatgtgtggaacaatgctacatctacacttggttggcttaatcaacctcttcaatggtgggccctgaggaagcaccaccagagggaggagctccaccaccaggaaatcccccaggcattcctcctggcatgcctcctgcactctggtacagcttggtgatgatggggttgcaaactttctccagctctttctgttgatgttcaaattcttccttctcggcagtctgattcttatcaagccagttgataatttcattacacttgtccagaatcttctgtttgtccaatcgtaaacctgccttgagtttccaacttcaacagt

SEQ ID NO: 335 - DNA, 630 bp, Homo sapiens
gttcgggagccgcggcttatggtgcagacatggccaagtccaagaaccacaccacacacaaccagtcccgaaaatggcacagaaatggtatcaagaaaccccgatcacaaagatacgaatctcttaagggggtggaccccaagttcctgaggaacatgcgctttgccaagaagcacaacaaaaagggcctaaagaagatgcaggccaacaatgccaaggccatgagtgcacgtgccgaggctatcaaggccctcgtaaagcccaaggaggttaagcccaagatcccaaagggtgtcagccgcaagctcgatcgacttgcctacattgcccaccccaagcttgggaagcgtgctcgtgcccgtattgccaaggggctcaggctgtgcgcgccaaaggccaaggccaaggccaaggccaaggatcaaaccaaggcccaggctgcagccccagcttcagttccagctcaggctcccaaacgtacccaggcccctacaaaggcttcagagtagatatctctgccaacatgaggacagaaggactggtgcgaccccccacccccgcccctgggctaccatctgcatggggctggggtcctcctgtgctatttgtacaaataaacctgaggcagga

SEQ ID NO: 336 - DNA, 236 bp, Homo sapiens
tttttttttttttttttttttttttgcccaccaagagggagtcctttaatagagatcggcacagacaggagacacaacagcccaggcgccctgcttgcacaggctggggccctgagccaacagatgcagtggcttcctcctcccccacctgggtgtgggcccatggggtggagacagagaggtggctttaaaaaacacagctgtactaattcttcactttcacagagaaggggaac

SEQ ID NO: 337 - DNA, 255 bp, Homo sapiens
amaaatagcactttttatttgccactatttgargtctgaactttaaacagattcttggactggkggttcatatccatcagctcgttcaactttagcacctsccycgtccccagtggcttttccagaactactgccttcaccatgaagctccatgrgctttcccaattcaaacttgggcttcttcagcatttttacttttctaacggrgacatcatggrgaggataaatagattggcaagccttttctatgccytt

SEQ ID NO: 338 - DNA, 369 bp, Homo sapiens
tttttgctatacatctgcatttattatgagcagcaggtgggacacttccagcaacagtaaaaaaaagtaatttacaaaagcaggtttcagtgaagccatctggttgttacccttgggtgctcacacgtagatgccaacccagagcagcaggaagaggactccaaagcccatgaagagtgaggccactaaggagatgaggagctctttatagatatcacgagtgtacttggtagaggtgacctcgtaaacgaagaaccaggcggtgaagaacatgccaatggccaaaagcaccacggtcagatgggggaagacagctgggttcactgggctggtatatctgctcatggcctcgactccattttgccccgc

SEQ ID NO: 339 - DNA, 327 bp, Homo sapiens
  misc_feature: n=a,t,g or c
cagggtttggctttttattgacacaaatacacataggcagntnttggtaatggggaggtggggtacacaaaagcagaaatcgcacttcacacatttaggnctcanttagacaatgaggaggctgagcctgtccctccaccgcccattgcaatggttnnggcaataaccctccctaatcctggctcagtgagtagagggagtgaccggcccacccaggaggtcccccctttggttgcaatggcccaggtcctgaccatcccactctgtagtnccctgntccatctaccccacccatgtaaacagagttttgggctgcgttgtgataag

SEQ ID NO: 340 - DNA, 347 bp, Homo sapiens
aaacgaaaacgaggactttattataaaaaaacgttggaccacgttgggctgggcaccaggacagtgtcctggcacgtttccaggcgagccgcgcaggctccttggagcagctcctcgggcaggaaaccctgtacgccagggattggagaggcctgcgccaccctccatgcaacgtccagacaggtggatgttcagcagcccgtccaaagggatgctccaagcgctgtggggtggggccagaagcccgcccacctgggccctggaggaggctggagtgtgagagcctctgtgacgcgcatctgccgggctactcatacagccagtgcccagcgctgtcctcccagcag

SEQ ID NO: 341 - DNA, 350 bp, Homo sapiens
  misc_feature: n=a,t,g or c
ttttgtggggggggcaactaaacaaacacaaagtattctgtgtcaggtattgggctggacagggcagttgtgtgttggggtggtttttttctctatttttttgtttgtttcttgttttttaataatgtttacaatctgcctcaatcactctgtcttttataaagattccacctccagtcctctctcctcccccctactcaggcccttgaggctaattaggagatgcttgaagaactcaacaaaatcccaatccaagtcaaactttgcacatatttatatttatattcagaaaagaaacatttcagtaatttataaataaaggggcactattttttaatgaaaanaatttg

SEQ ID NO: 342 - DNA, 343 bp, Homo sapiens
  misc_feature: n=a,t,g or c
gttgacaaaagaatcagaaanatatcgaaaactttactagaaatatagagaaaaaaaaataactgcctgggaggtttcctgtccctncaggatggatgaccaacagatggggcacctaggtccagtggggctgctcccgatctactgtttcttcctccaggagcaaggcatctagctcctccagccgctgctggagcagggggcccacatcagggctgggggccacattgggaggaacagtcctgccccctgcagcccggaccccacgggacggtcttcgtgatcgaggaaggctgctgtcccgaaattccacagcccgccggagcttccttgagctggtgaa

SEQ ID NO: 343 - DNA, 224 bp, Homo sapiens
ttttaggtctgcagagcatttattccgtcccagtggggaggggcagggatccaggtggccggaggtacagggcctacgtgtaccacatgaagccgtggctggcatggagagcctcctctgtggtgcgcagccgctacagctccccgatcaaggggggcacacagcgcgtgtgtgtggaacacagactcccccaccttccagtcgggcacgtccttcatgatgat

SEQ ID NO: 344 - DNA, 381 bp, Homo sapiens
gatggttttgcactggtttttgtgaatgtttcttacaaaaagaaaaaggaacaaagaataaatagtgaccgtgaagaaaggtggtcttgatttggggttggggatagactggggcgaggcagaagcttgacaagaggctgctgatggctggagggagctgggagaagaggcgttccaggtcaccccaaacggagcgtagagcgcgcccacaccgagctttcctcgctggacttaagggcccctgtccctcacccctctgccactgcctccttcccaactgtaaatctccttgccttagagtccccctgccctccaagctgtacgtctgtcttccagatcttacctgacctgcagccccctccctcaccctcacctgcaggc

SEQ ID NO: 345 - DNA, 82 bp, Homo sapiens
tatttttgacctgtacaataggcactttattagtggttggaatgcagttacacgcaggggtgtgcagacgcaatgggggcag

SEQ ID NO: 346 - DNA, 382 bp, Homo sapiens
ttttttttaaagaaagtttactatgtgtaatgcaaggcacttatgtctctgcttaaagctacaagggaaaaaatgacaagcccagtttttttcaagggaaatattttttctctgtgaaaggtcagtagtaaaagagctagtttaaagtcatggagtttttgccaaaaaccatgtctcgaggttttatgcatttctaatggctttgcccataggagagatacccagagtggacaaacagaggctaaggaaaaaaatgctgttcatttagatcagaataacctcgctccaatctgggaaaccactcaaatgacacatacaagtctgtatgaaaaggcaaaacaaactcctgggtgatatgcagttattccattcaacatgttta

SEQ ID NO: 347 - DNA, 364 bp, Homo sapiens
  misc_feature: n=a,t,g or c
ctatgtcagagctagtgatttcaaaaggtttcacaattccccaagacaaaagtgattttcgttcattataataaggttaagtgatatgtgattcatagcaattttgatgtgaagaagggaaggacatcattgacttaataatagtatcagtcggtgcaacagttggcaacatgtgccttcacactttaccataaagagacgggtttgagggtttgccttctaaagtctgcaacttcaagaaaaaaaatcgacactgtggattgactttcccggtcactatataaagcaaataaacttaaaacactttgtaaccatgtatttactctgccaggtgcctatattccaatanaatgttcatccttga

SEQ ID NO: 348 - DNA, 333 bp, Homo sapiens
gcatcataaattttattcccgatgcgggacagattccttccatccccaaatgaatcacatgctgccctggaaagacctaggaaactctcctaccatctccagagaagtagtgagaaaggcaggtgctggggactgggaaggctttgaagtttcccagcctacttatcctccccttctcaagagaggatagctgttccctattactcctctcatccactcatcccttaaaaaaaacccacaaaaccatcattagtaaaaaaacaaaaccccttcaagtattgggggttaggggttctgggctgggacttggggttatgggtcaccaatgaaagt

SEQ ID NO: 349 - DNA, 576 bp, Homo sapiens
cattttttccatttttatttgatgtttccaaatataaaaaagtcaggattcttacatcaattatctcaaatgagaccatgcaaagcaattcagtgtatacaacaatcatttttccccttcagttctgctgctttatacaacagtgtgattgacagaaaattggatggcatgtgcctggtcagaaaatgtcatctgtttacaaaataacgtcatgcagcacagtttctactttgtctgcaagtcaattcacaaaaactacttattttctgttttttatttgggaggcacatggaactgaaaaatttagctgcccaattttattcaactaccccaccaaaaaaaaaaaaaaaatcacaaatgacagtcccaacactctgcaaattttggagggttgagatagtagacactatttgtcatactcagcagagttaactatttaacagaaataaatctccctagggcctttcctctcattttgctagactggggtccaggagaatcgtgaagaacccctcatgtaaaatttggaagtggggaaactgtgtggtggcattatgcagattttggctagttgca

SEQ ID NO: 350 - DNA, 334 bp, Homo sapiens
ttttccacacttggccagtttattaaaggcagggagcttcggcagggtccaaaagggagaagttgggagatgccccctcctcagctccctccttccccaacaactcttctacagcccagcccccagggcccagaggcagggctggcgtcaggcagactgtactgcataaatacgtggaggccacagcccgaatcagcagcgtcagggggcagggaaactgggtttgggatgagaagtgggtggctctgggggcacgtcccccagtgcttgtccagagcccagggacccacagagccagagaggggaccagtgggccagcttggggtctggctac

SEQ ID NO: 351 - DNA, 233 bp, Homo sapiens
gagagcaaatcccatttattggaatttcactgacaacaaattgagaggaaggcttccccctcccctgaaacatgccatcctctctgccctcagggtcagcacagggataagaaccccactccgcatgtccccagaggcagcactccaggggggtgggggggaggggaggggtgctctacgccaggctggggagctgggacaggagggaagacgtgcaccctcacctcttggct

SEQ ID NO: 352 - DNA, 464 bp, Homo sapiens
agaaggaagggctttattcagctgggagcatcggcaagctacagccttaaaatctgagctcctcaagtgcacaatttctgtcccttttaagggctcacaacactaaagatttcacatgaaagggtcgtgattgattgagcaatctaggggatatgtgacaggggtttcatgcactggtacagaacacaacagggagtttcacaatttttttatacaatgcttggaatctacggataacatcaggttctaagtcgtaagttgatttttaactactaggtttaggccaggcaggcccagggctggtttcaggcctggtgccggggctgcctgtctttgatttcacttccttgtttttttcttaaaacaggtactgagtataaaacaatataaaacaatatgagaaggtctctctcttccctcaagagtgtatgactttgctgcccaggatgatcttgaactcctgg

SEQ ID NO: 353 - DNA, 2767 bp, Homo sapiens
gggcgggcgcattgcagactgcggagtcagacggtgctatgtacgccctcttcctcctggccagcctcctgggcgcggctctagccggcccggtccttggactgaaagaatgcaccaggggctcggcagtgtggtgccagaatgtgaagacggcgtccgactgcggggcagtgaagcactgcctgcagaccgtttggaacaagccaacagtgaaatcccttccctgcgacatatgcaaagacgttgtcaccgcagctggtgatatgctgaaggacaatgccactgaggaggagatccttgtttacttggagaagacctgtgactggcttccgaaaccgaacatgtctgcttcatgcaaggagatagtggactcctacctccctgtcatcctggacatcattaaaggagaaatgagccgtcctggggaggtgtgctctgctctcaacctctgcgagtctctccagaagcacctagcagagctgaatcaccagaagcagctggagtccaataagatcccagagctggacatgactgaggtggtggcccccttcatggccaacatccctctcctcctctaccctcaggacggcccccgcagcaagccccagccaaaggataatggggacgtttgccaggactgcattcagatggtgactgacatccagactgctgtacggaccaactccacctttgtccaggccttggtggaacatgtcaaggaggagtgtgaccgcctgggccctggcatggccgacatatgcaagaactatatcagccagtattctgaaattgctatccagatgatgatgcacatgcaacccaaggagatctgtgcgctggttgggttctgtgatgaggtgaaagagatgcccatgcagactctggtccccgccaaagtggcctccaagaatgtcatccctgccctggaactggtggagcccattaagaagcacgaggtcccagcaaagtctgatgtttactgtgaggtgtgtgaattcctggtgaaggaggtgaccaagctgattgacaacaacaagactgagaaagaaatactcgacgcttttgacaaaatgtgctcgaagctgccgaagtccctgtcggaagagtgccaggaggtggtggacacgtacggcagctccatcctgtccatcctgctggaggaggtcagccctgagctggtgtgcagcatgctgcacctctgctctggcacgcggctgcctgcactgaccgttcacgtgactcagccaaaggacggtggcttctgcgaagtgtgcaagaagctggtgggttatttggatcgcaacctggagaaaaacagcaccaagcaggagatcctggctgctcttgagaaaggctgcagcttcctgccagacccttaccagaagcagtgtgatcagtttgtggcagagtacgagcccgtgctgatcgagatcctggtggaggtgatggatccttccttcgtgtgcttgaaaattggagcctgcccctcggcccataagcccttgttgggaactgagaagtgtatatggggcccaagctactggtgccagaacacagagacagcagcccagtgcaatgctgtcgagcattgcaaacgccatgtgtggaactaggaggaggaatattccatcttggcagaaaccacagcattggtttttttctacttgtgtgtctgggggaatgaacgcacagatctgtttgactttgttataaaaatagggctcccccacctcccccatttctgtgtcctttattgtagcattgctgtctgcaagggagcccctagcccctagcccctggcagacatagctgcttcagtgccccttttctctctgctagatggatgttgatgcactggaggtcttttagcctgcccttgcatggcgcctgctggaggaggagagagctctgctggcatgagccacagtttcttgactggaggccatcaaccctcttggttgaggccttgttctgagccctgacatgtgcttgggcactggtgggcctgggcttctgaggtggcctcctgccctgatcagggaccctccccgctttcctgggcctctcagttgaacaaagcagcaaaacaaaggcagttttatatgaaagattagaagcctggaataatcaggctttttaaatgatgtaattcccactgtaatagcatagggattttggaagcagctgctggtggcttgggacatcagtggggccaagggttctctgtccctggttcaactgtgatttggctttcccgtgtctttcctggtgatgccttgtttggggttctgtgggtttgggtgggaagagggccatctgcctgaatgtaacctgctagctctccgaagccctgcgggcctggcttgtgtgagcgtgtggacagtggtggccgcgctgtgcctgctcgtgttgcctacatgtccctggctgttgaggcgctgcttcagcctgcacccctcccttgtctcatagatgctccttttgaccttttcaaataaatatggatggcgagctcctaggcctctggcttcctggtagagggcggcatgccgaagggtctgtctgggtgtggattggatgctgggggtgtgggggttggaagctgtctgtggcccacttgggcacccacgcttctgtccacttctggttgccaggagacagcaagcaaagccagcaggacatgaagttgctattaaatggacttcgtgatttttgttttgcactaaagtttctgtgatttaacaataaaattctgttagcccccccg

SEQ ID NO: 354 - DNA, 1517 bp, Homo sapiens
aggagggaagagtgtgcagacggaacttcagccgctgcctctgttctcagcgtcagtgccgccactgcccccgccagagcccaccggccagcatgtcctctgctcacttcaaccgaggccctgcctacgggctgtcagccgaggttaagaacaagctggcccagaagtatgaccaccagcgggagcaggagctgagagagtggatcgagggggtgacaggccgtcgcatcggcaacaacttcatggacggcctcaaagatggcatcattctttgcgaattcatcaataagctgcagccaggctccgtgaagaagatcaatgagtcaacccaaaattggcaccagctggagaacatcggcaacttcatcaaggccatcaccaagtatggggtgaagccccacgacatttttgaggccaacgacctgtttgagaacaccaaccatacacaggtgcagtccaccctcctggctttggccagcatggcgaagacgaaaggaaacaaggtgaacgtgggagtgaagtacgcagagaagcaggagcggaaattcgagccggggaagctaagagaagggcggaacatcattgggctgcagatgggcaccaacaagtttgccagccagcagggcatgacggcctatggcacccggcgccacctctacgaccccaagctgggcacagaccagcctctggaccaggcgaccatcagcctgcagatgggcaccaacaaaggagccagccaggctggcatgactgcgccagggaccaagcggcagatcttcgagccggggctgggcatggagcactgcgacacgctcaatgtcagcctgcagatgggcagcaacaagggcgcctcgcagcggggcatgacggtgtatgggctgccacgccaggtctacgaccccaagtactgtctgactcccgagtacccagagctgggtgagcccgcccacaaccaccacgcacacaactactacaattccgcctagggccacaaggccttccctgttttccccccaagggaggctgctgctgctcttggctggacccagccagggcccaagccgacccccctctccctgcatggcatcctccagcccctgtagaactcaacctctacagggttagagtttggagagagcagactggcggggggcccattggggggaaggggaccctccgctctgtagtgctacagggtccaacatagagccgggtgtccccaacagcgcccaaaggacgcactgagcaacgctattccagctgtccccccactccctcacaagtgggtacccccaggaccagaagctcccccagcaaagcccccagagcccaggctcggcctgcccccaccccattcccgcagtgggagcaaactgcatgcccagagacccagcggacacacgcggtttggtttgcagcgactggcatactatgtggatgtgacagtggcgtttgtaatgagagcactttcttttttttctatttcactggagcacaataaatggctgtaaaatctc

SEQ ID NO: 355 - DNA, 317 bp, Homo sapiens
  misc_feature: n=a,t,g or c
tcaagtctaagtgtttaattattattcacatatttcacagaaaaaaaggaatgtagcaaatgagtcggagttgtagaaaaaaaaaatcctggnttttacgtgtcattctgttttcatctgacagcagggctgtcccgacatcaggcacagcagctgcacttctctgacgcccctttgcagatgcagccctgggcacacttgggcacagcccaggggnaaacaggagcagcagcctgggggaaaaagggagagagaaggtcacaggcagacttnaccagggganctccctttcccaacagcaggcctgggctcaagct

SEQ ID NO: 356 - DNA, 1293 bp, Homo sapiens
cacgtcagccggggctagaaaaggcggcggggctgggcccagcgaggtgacagcctcgcttggacgcagagcccggcccgacgccgccatgacggccgcgctcttcagcctggacggcccggccggcggcgcgccctggcctgcggagcctgcgcccttctacgaaccgggccgggcgggcaagccgggccgcggggccgagccaggggccctaggcgagccaggcgccgccgcccccgccatgtacgacgacgagagcgccatcgacttcagcgcctacatcgactccatggccgccgtgcccaccctggagctgtgccacgacgagctcttcgccgacctcttcaacagcaatcacaaggcgggcggcgcggggcccctggagcttcttcccggcggccccgcgcgccccttgggcccgggccctgccgctccccgcctgctcaagcgcgagcccgactggggcgacggcgacgcgcccggctcgctgttgcccgcgcaggtgggcccgtgcgcacagaccgtggtgagcttggcggccgcagggcagcccaccccgcccacgtcgccggagccgccgcgcagcagccccaggcagacccccgcgcccggccccgcccgggagaagagcgccggcaagaggggcccggaccgcggcagccccgagtaccggcagcggcgcgagcgcaacaacatcgccgtgcgcaagagccgcgacaaggccaagcggcgcaaccaggagatgcagcagaagttggtggagctgtcggctgagaacgagaagctgcaccagcgcgtggagcagctcacgcgggacctggccggcctccggcagttcttcaagcagctgcccagcccgcccttcctgccggccgccgggacagcagactgccggtaacgcgcggccggggcgggagagactcagcaacgacccatacctcagacccgacggcccggagcggacgccctgctgccgacgccagagccgccgcgtgcccgctgcagtttcttggacatagaccaaagaagctacagcctggacttaccaccactaaactgcgagagaagctaaacgtgtttattttcccttaaattatttttgtaatggtagctttttctacatcttactcctgttgatgcagctaaggtacatttgtaaaaagaaaaaaaaccagacttttcagacaaaccctttgtattgtagataagaggaaaagactgagcatgctcacttttttatattaatttttaggacagtatttgtaagaataaagcagcatttgaaatgcccct

SEQ ID NO: 357 - DNA, 66 bp, Homo sapiens
tttttggcgagaaccgggtagtgtttattgccaggaggacacccgcacagcctccggaccccagag

SEQ ID NO: 358 - DNA, 1594 bp, Homo sapiens
gcccgccggtccacgccgcgcaccgctccgagggccagcgccacccgctccgcagccggcaccatgcgcgagatcgtgcacatccaggcgggccagtgcggcaaccagatcggcgccaagttttgggaggtcatcagcgatgagcatgggatcgaccccacaggcagttaccatggagacagtgacttgcagctggagagaatcaacgtgtactacaatgaggctgctggtaacaaatatgtacctcgggccatcctggtggatctggagcctggcaccatggactctgtcaggtctggacccttcggccagatcttcagaccagacaacttcgtgttcggccagagtggagccgggaataactgggccaagggccactacacagagggagccgagctggtcgactcggtcctggatgtggtgaggaaggagtcagagagctgtgactgtctccagggcttccagctgacccactctctggggggcggcacggggtccgggatgggcaccctgctcatcagcaagatccgggaagagtacccagaccgcatcatgaacaccttcagcgtcatgccctcacccaaggtgtcagacacggtggtggagccctacaacgccaccctctcggtccaccagctggtggaaaacacagatgaaacctactccattgataacgaggccctgtatgacatctgcttccgcaccctgaagctgaccacccccacctacggggacctcaaccacctggtgtcggccaccatgagcggggtcaccacctgcctgcgcttcccgggccagctgaacgcagacctgcgcaagctggcggtgaacatggtgcccttccctcgcctgcacttcttcatgcccggcttcgcgcccctgaccagccggggcagccagcagtaccgggcgctcacggtgcccgagctcacccagcagatgttcgactccaagaacatgatggccgcctgcgacccgcgccacggccgctacctgacggtggctgccatcttccggggccgcatgtccatgaaggaggtggacgagcagatgctcaacgtgcagaacaagaacagcagctacttcgtggagtggatccccaacaacgtgaagacggccgtgtgcgacatcccgccccgcggcctgaagatgtcggccaccttcatcggcaacagcacggccatccaggagctgttcaagcgcatctccgagcagttcacggccatgttccggcgcaaggccttcctgcactggtacacgggcgagggcatggacgagatggagttcaccgaggccgagagcaacatgaacgacctggtgtccgagtaccagcagtaccaggacgccacggccgacgaacaaggggagttcgaggaggaggagggcgaggacgaggcttaaaaacttctcagatcaatcgtgcatccttagtgaacttctgttgtcctcaagcatggtctttctacttgtaaactatggtgctcagttttgcctctgttagaaattcacactgttgatgtaatgatgtggaactcctctaaaaattacagtattgtctgtgaaggtatctatactaataaaaaagcatgtgtag

SEQ ID NO: 359 - DNA, 584 bp, Homo sapiens
  misc_feature: n=a,t,g or c
gctgctttggacagacactggaaggcaccccagacccctggtggtggtgtaatccgataactttattttaattgaaaatggaggcataacatgtcctagaaaaataaagatttaggatacaaaggagacacagcggcagggctgcccccagggatgagggaatctttggtctgggccggataatgaggacaagggcttgagtcgaggggagctggtgaaggaagacccccgtctccccacagctgccccaccccccgcccctggcaggaaatgccacactggggagggtctccagtctcaggggcgcggggtgcctgtcctccaccttcggattccaggcagttgtgacaacaccagctatcggcagagtattaatagtgtttcagggagtgacagggagagggctctgggggctggaagttccggccctggggcagggtgttccgcttacagtagtaccagtggagggggcaggcctgaagttcaggaccctgagttccccacgtatatggcagggacagattgggaaggcgtaacagaaagcctccatccaangggatgagacttgacagagttggccggga

SEQ ID NO: 360 - DNA, 591 bp, Homo sapiens
  misc_feature: n=a,t,g or c
cattctgaaagatgtagagaatacagggactagaagcacttatattctcccaacaaatttgcatacatgacaaaaaacaggcaaaaggcagagagacccaaagacgggatttattgggggcccagtcatcacctggaagtcagaaggcgttgaagtatcgcggggatcttcatgatgagcaggaacagggctcatcatggcaggactgtgatagagtcagaaactgactctgtgacctggcgcacccactgcaggtacggaaagttcccctgttccacaggcaatgcaattacctcggccacttcgtaagggtgcacagaacgaacaaaatctgtcaaagctgggaccaaggaactttgggttttaatcatcatcagcacctcactgtctttcctcgatcttccctttccactcatagatggatgtaatctgagggatgaggttgacgcaggctgctaggcgcttctccaccacggccctggcgatctccttgggcgaccttctcgttggggcaagtaacaaaggctgcagagaccgagcccggaacgtagccagagccggatccgaggccggcnaggctgggtcggaggg

SEQ ID NO: 361 - DNA, 305 bp, Homo sapiens
  misc_feature: n=a,t,g or c
tttttttttttttttcagaagaaacgttttattatttttttgtcggggaaaaaaagccatataaatattagagtataaaacttgcgtgagacacaggaagagggtggggtgggagctacgtaactatgcgaagagaagcgcttataggagangtcagtacggnggaggggntcgccttagccagtggacacagcacaaaacacaacacgggccgccgcggcagatcaangacagacggctgcncggacccnccgcccgctgcccacccgccatcacgtaaaagcacaccgcantacactactggc

SEQ ID NO: 362 - DNA, 106 bp, Homo sapiens
gcaggtcagcaacaagtttattttgcagctagcaaggtaacagggtagggcatggttacatgttcaggtcaacttcctttgtcgtggttgattggtttgtctttat

SEQ ID NO: 363 - DNA, 281 bp, Homosapiens
taccaaaatatctgtattatctataaaaattgaactctaatgagtcactgatacgggaggcagcaatacccgactgtgctgacatgcagaaggaagacagctctgtcccaccaaccctatagcagaacatttgtattgagtggcacgtgggctgagtcatttgtaaggtctcaaaaacctggacactttggaacgtagcaatcggatgaacgatcttggaaacatctctcgggactcctgggctgtgtacttgaaatagttctggggatgggccaggacat

SEQ ID NO: 364 - DNA, 347 bp, Homosapiens
tgagagacaataggaatttttaatgcatggacaggcctgcagggactctgggcagacccacaggtagcaggaagaggcagggtcccacaaactcaataatgtccagcaaaaaagagagagaagtccttaaagacccatgcttcctcactgcaaccatcctcagagcttccttcctggtgctgaagaggtcaaaactgtctcctctaggggtcaggtcaaaactgtccctccataggtctcctccaggggtccatggcaggaagaaagcagagtgtggcaggaagaaggaagaagagcaaaggccgcttggtctccacctgaaaacttctgccttgggattgacagcc

SEQ ID NO: 365 - DNA, 321 bp, Homosapiens
ggcctcacagctttttattgaagtacaacataaatactgaaaagtacacatataaacatgcctgcagtttcatgaagttttacaaacccaatccacccacataaccagcatcaagctcaagaaatagaacttgtccatccccctagaagtccccagaagccccctccaaatcactgcccctcccccaagggcagccacgctcccaaccttttaattatattttgaaagtaaagctggcaggatcttttgctggatcgaatgggggcgaggggagctggtgaaagacaggagtcaaagagagcccccaggtttggggtgaag

SEQ ID NO: 366 - DNA, 243 bp, Homosapiens
gtacagatcctttttattcagatttatataggcaatttaccaacacagaaaaccagtctagcagctccaaagtaactgtaaaaacggtggtgctgacggtggtgtgccccacacagggcaggtgacctcagacgtggagcagcatctcccgtgggatactatttcagacgtgcactagtgagtgtatactgagaagggattataaaccttccctggcacaacagatacaaaaagagatagaac

SEQ ID NO: 367 - DNA, 871 bp, Homosapiens
gctgtcagaaaacaataacagcagtgagaatgaacgcacttaaataaaagctcgtgtctagagtctctccttttataggcctttcatgcaaataaagaattcaaaatatccagctctgattgggcaatgtgttagtgacgcatacatgtaaaatagccttcaccttatttcctttctaattggttggctcgtcaaagaacaattttaaccaatcaaattgcgcctttcacaattctaccgatgactataactagcttcttattcctccatcgagcccattctttttctttattcagtggattgttagttcttctgctgttaggaagccactatgtctggacgtggaaagcaaggcggcaaagctcgggcaaaagctaaaacgcgttcttccagggccggtcttcagtttccagttggccgtgtgcaccgcctcctccgcaaaggcaactactccgaacgagtcggggccggcgctccagtgtacctggcagcggtgctggaatatctgacggccgagatcttagagctagctggcaacgcggctcgcgacaataagaagacccgcatcatcccgcgccacctgcagctagccatccgcaacgacgaggagctaaataagcttctaggtcgcgtgaccatcgcgcagggcggtgtcctgcccaacatccaggccgtattgctgcctaagaagacggagagccaccataaggccaagggcaagtgaaatgattactagtcaaatccgtcagtgatcccgagtcccagaaaccaaaggctcttttcagagccacccaccttttctgtaaagtgctggaatacacatacgatgcctgaaatctcaatgttcactgtcctaatttttaacgaactt

SEQ ID NO: 368 - DNA, 284 bp, Homosapiens
  misc_feature: n=a,t,g or c
agaatttatttttactttattaacaatgtggcttacaatttttttgaagtaaaaagggtttttttcatttagaataaaaattaaaatataactctgntatagattttcatttatttacatgaaaacatatatacagaatacaatcttacagcaaaccaaaagcatgcccttngtcctgcaaatttcaaaagtaatgacaccaattttccccttttacgcaccaaaaacatacacaagataggaatccaatttcaatacaaactattcaaactagaatgcaaaac

SEQ ID NO: 369 - DNA, 8670 bp, Homosapiens
gagctcaagagttcaagacccgtctgggcaagatggcaaaactccatcaccacaaaagatgcaaaaagatgcgcacagtggcgcacacctatagccccagttactgaggaggttaatgtgggaggatcacatgaggctgcagtgagctgtgatggtgccactgtactccagccttggcgacagtgagtctatgtctcaaataagtaagtaaacaaaaattaaaaagaatccagtccacagggcatttgaaggcaagaggaaaagatgccagaatcagagatggggagaagatgggcttcacgcacctgctgaggttgagaaatgagacagataggctgagtgtggggtggagagaggatgggcagagagactgaggctggtctgaatggaaatgaaatgttagggctctcagggttatcggggaataattggagcttctaggaaaggtttaacgttgtgaccacctgtgtgcgtcatgcctccccaccccttactaattgtgtgaatttggcagactttgagtctcagtgttctcctctgtgaagtggggtcatcttattccaactcctgggattgttgtgtgaattaaatggggtaatgtacggagagcacctgacgcacagcgagtgcttcaaaatttcagtctgcaccccccagcaaaggatatgcacacgcccattgtgagtgacaaatccaggatgacctgaacccaatgtgataacgtgggtcctcgcatgctggtcatgctgccgggagacacttatggatccaattagtacaacaggggaaataaattatttaatgcattttgctaagacagaatacctcagaacttattttgtggggtggggcataataaagggggtccttctgctgaaaacgtttaagctcaggttcgtggcaccactcaaccaaggtcgacagtcacacagtaagccagaggcaatgtcaggacttaaactaaacctgtggcccccacaatgaggccatttctctttcccctgaacggcctggggaaagggggtgggtgggcagaacttggcagtggccaatccctcacttctgtcccctggttttctcctgcccttatctctaggcttgcattgattgattgattgagacagggtcttgctctgtcgtccaggctggagtgcagtggcacgatcatggctcactgcagcctcaaactcctaggctcaagtggtctttccgcctcctatctcccgagtacccatatccctaggcttttaaaatggcttccaggtatctggctgccgtctcagacatccacctgggcttctgggcagggactgtccgggaaacctcatctatgtgaagcaggtgtgggtgtaggaaggccgcttggaaatgaatcagcactgtctcctgtttgagtcgtaagcagggcgccagagggtctggcggacaagaaagggaggatgacaggaggccggcactgcaatgacacgccttagccaccagagggcacgaagcagctgggcaaaatcccgcggggcccctggtggaaaatttctggcacctggagcccggagatggggtggacggaatgtgaggacccagcttcctgaggctgggccggggcagagtcactgctttggatgtccgcagggcctgcttgtgtcttgactactctgcctttgtagacagctggagaatgtgagagtgggattgggatcggactctagggccattccgtacaactctcctgccctgccgtgggggagggagttgcccaaggttacgcagcaagttagtggcaaatgaatacgattatcaccagtctcaggtatatggccatttgatgggcgcagtcgcagcctcagttcctgagacagagacacctgattaaggacaggccttcaggagctgaccctagtgacccgcggctctgctgctgtctctgtttttctccctggcttttccatctgactgactctttgtcttcttcgtctgcctgcctgtctccgtctctgcccgctggggggtttgctcaactccctcactgggtcctgggagccgcagtttcctgctgtcactcctcagggatttgtagctctctgaagctcttttccgacccgttgtctcggttccactcttgggatccagaggagaggtgattatttcgtagcatagtcagtggtgtgatttcacggggtgagaaggactcccttgctcctaagcactcctccagtgacccctgttgccatgtggtagccgtaagcactggttggcacctggtgtgggcgagacccttacctcatgcagaaatgagtaagactggtgagctcactatgtggggtgaggctgagagaaaacaagtacacaggtgattcagtcaaaatcagaattctctaagtacacacgaaaagggcaaaaggggcgctttgtacaggacagaacaggtagacactgaatccggttgggccctgggaaggctccctgcagtggcctttgaagggggggttggatttcagcaggatagagggcatgggcatgtgtgggcacgttctgaacagaggggtcagcgcaagccgagggtcttggccacactagttgcatgtgccggtgtgtttaagggacacgcagcagcaggccgagtctggagcgcctcactgccaggctttttaaaaatttttaattttaatttaattttattttatttttactttaagttctggcatacatgtgcagaatgtggtttgttacataggtatacatgtgccatggtggtttgctgcacctatcaacccatcatctaggttttaagccccgcatgcatcaggtattagtcctaatgctctccctccccttgcccccatccttctccccgcaactgcccacaggccctggtatgtggtgttcccttccctgtgtccatatgttctcattgttcaactcccacttatgagtgagaacataccgcctggctttaagggacagccatggggatgcactgcagtttctgagcagggaaggccctgtggaggcccttagttaaaaggaaagaatggctgtgaaaatcgatgcattgcgctcccttgtccctcaccctcagtgtgaagggtttttattccgagttctacttgaagtaggcctcgatgggaagacaagtagcatgaggggttcaagtactgaggggagcaagggacactcggtggctgtgccaaggtgtagaagaggacactgggggccccaagacctgacttcatgtacactgctcaggctggcccccaagtcacacggtgaccgctaggaagggaccagcctgttctcagtctgatcctacagccatgtcattatccaaagctcctcctggcagggcctgtttggggtctctgtgccagtgctttccctgccaggctgggctggggcttccacctactgctctgggactgctgctgccctggccctgggggaggagggtgtgccgctgagtcactgcctgggcatctgggcctggaacctcgggtgagtcacttagggctgaggtagaggggctgggggaggggaagaagctactcgacagctggagcagggaggggagctggggccacaggaagggcggtgccctgatgcccagacgggccgggatagacaaagggccaaggaggaaggggccctgggagggggcagccctcccttgggctggggtctgaatggcacagtgtttgcctttctccgggtctggggaggacatgtgtgtggggggcagtgagagagggctgtggctgagggctgtgcttcaggcctggattctggcttgggaagctgtccagctggtgttttcagccttgggtagggatgtacccctacccacccacccagccctcaagctggagaagaggaggccaaagttttcctgttcagcctttaactactcgggacttccttatgctccccacagactgtggcccagcccaactgcggctgtgtgtagagcaaccccatttctcactgcttccccatccttccagacaccttcctacacagagggaccttcccaggtatttctaagcacacttagttacctcattacctcattaagaggtattctggtgctggccattaaaagtcactccacttcatccatgccctgaagtcagtcctgtccttctcctcctgatgtcccccagctgcctcctctggcccccagcttcctaaggtggccccaggttgcttctctctcacacacacgggcgcatgtatgtacacgagcactggaccatgaagtctcagcgtgtgctcacagcctctcacacaggagtgggctgtgactcacaggcatgtcatgagaatgaggcctggcaccagtctccaggccccagagcaggggttgcctcccctcaccccggtccaggatgcccagtccccacgacacctcccacttcccactgtggcctgggtgggctcaggggctgcccttgacctggcctagagccctcccccagctggtggtggagctggcactctctgggagggagggggctgggagggaatgagtgggaatggcaagaggccagggtttggtgggatcaggttgaggcaggtttggtttccttaaaatgccaagttgggggccagtggggcccacatataaatcctcaccctgggagcctggctgccttgctctccttcctgggtctgtctctgccacctggtctggtgagtacctctgtcctgctgagggcagggtggggaggatccccgtgggtctctgtctttgtctccacagttctctcattccagcttccctggtgggatcaacctgggcctctctgggccttcccccttggaagaactctctgtgaagtgctgaagtgttgactgaagggttttttttttttttttttttttttgagatggagtctcgctctgtcgcccaggctggagtacagtggtgtgatctcagctcactgcaaactccccctcccaggttcacgccatttccctgcctcagcctcccgagtagctgggactgcaggcgcccaccaccatgcccggctaatttttttgtatttttagtagagatggggtttcaccatgttagccaggatggtctcgatctcctgatctcgtgatccacccatctcggcctcccaaagtgctgggattacaggagtaagccaccgcgcccggccgactgaagggtttttctccaggttcctctgtgaggtctcagtgcaggggttgctctgaggccctcccctggatatctcagtctaggggcccttctttgggggtctaggcctaggagcaggaggtgtgcatgtgggcgttgctgcaaaaagaatcctgagatttttttttttttttttttttttgcaaagtcctggattctagcaggactaaggtgcaagaggcaggggtctcaagactctgcctgggtcatggccccaagcagcaaagctctgccccctgcctcggtgaaggcagggctggcatgatgggcccagggcatgccctgcctctggcatagctcctctggcctcaccctgaaacctgcctaacctttccaggctggtctgagtattctcagaggccttgccgctgaggtctgtcccatcctgatcccaaggcaatgaacatttcatatctttaattctaattccaacaggatccttcctggtggagagaatgttaagttgcccccaccctatccatgcccctgtctgcctagaggctcaggggccttcagggtgaggggagacacattccccaccctctgggagctcctagtctgagagaggaaacactcctgcccaagggagcttccagttagatggcagagagagatgcctctggcttcaggagtcccgagtctaaggagggaaacgactccttcagggagcttcctgctcctaggctgtagccatggctcctgccagactgcacaggagcccccatctgccagccggtgcatgtggccctgctccccagagcctgcgcagatgccatcaaaatgggactctggtcaccctgtcatttcccttctggcagacactaaaatggggagccctgccctcaggggggtgtcccaagtgccatcagaggaggcttggtgactcccagacacaagggaagctttagcgtctgccctcagggtgagatggaggtatccctccggcctcagggaaccacagtctgaggggagatgcagcccctgccttcccattcagagaggggttttgtgaggtggcttgggggcatagggcagaagtggatcctacaggctgagctaaggccccaagagcctcagcagtgtacccatcacctggcacctctgcagccacagatccatgatgtgcagttctctggagcaggcgctggctgtgctggtcactaccttccacaagtactcctgccaagagggcgacaagttcaagctgagtaagggggaaatgaaggaacttctgcacaaggagctgcccagctttgtgggggtgagtggcacaggcctgtgggggaggtcctggtgtgagtgtgggggtgcaggttaaatctctcccccagttccgggtgcctgtcgatgcaggtgccagggtggggcccagcccctccccactttagcttcatggctccactggagtggaaatgaggcccgagtgggagtgcttaattaatggctgtttcctgcaacattccagagaaccatgtgctgtgagggccttccgagtccatctgtttaatcctgtcattggaacttgagaaaccagagcccagaagggaaaagtgattgtcccaagatcacacagcactggcacgttctctctctctcttttcttttctttttttttttttgagatggagtttccctcttgttgcccaggctggagtgcaatggcacgatctcggctcactgcaacctctgcctccaggggtcaagcaattctcctgtctcagcctcctgagtagctgggactacaggcgcatcccactacgcccagctaatttttgtatttttagtagagacagggtttcaccatattggccaggctggtctcgaactcctgacctcgtgatctacctgcctcggcttcccaaagtgatttttgtatttttagtagagacggggtttcatcatattggtcaggctggtctcgaactcctgacctcaggtgatctgccctcctcggcctctgaaagtgctgggcttacaggcgtgagcaccgtgcccggactccttttttttttttttttttttgtggtggggggacaagatctcactctgtcacccaggctggatcatagctcactgtaatctcgaactcctgggctcaagcaatcctcccaagtagttggaactacaggagtattgtcaccatgcctggccaatttttattttttgtagagatggagtcttgctatgttgtccaggctgggcttgaactcctgggttcaagcaatcctcccacctcggcctcccaaagtattggaattacagatgtgagccactgtgcttgacctctttccatttttatatgccaaactaagaaagtatgttagggatagaaaagccctgctcagatatatagtctgggacattttgtggagaaatgcatcgaccttcaatttgtccctcaccctccctatactgactcattggtgattcccaaagttaggtgtcaggctttgaacacatgaggcaggtccttctttccttggtttaattttgtttttgtggctggttaaatttttctaattatttcggctagtattaaaaaagtgtttttcagctgggtgcagtggcctatgcctgtaatccccacagtgtgggaggctaaggcaggaggatctcttaagcccaggagttcgaccagcctgggcaacatagcaagactccatctctacaaaaataaaaataaaaattggccaggcatggtggcatacgcttgtagtcccagctacttgggaggctaaaggtgggaggattgctggagcccaggaggttgaggctgcagtgagttgtgattgtgccactgcactccaacctgggctaacagagcaagaccttgtcttaaaaaataaaaagtgttcttttctgaatctacctggctggtgttggggagcagcaacttcggtttcctcatcagcagaatggggtgatgatacctacctcgctgggctcctgtgggattcgagctgatgcatgctcagaggagcatccagtgtcctccctgtgtccaggaggagggcacactggagatgctcaccaatgagtatctgtctctctccttactcactgggccctcttggtagctcccagagcctcctgcccaccttatacccagctgcccagtggggagggagagctggaaccaacctgaatgtgtgagggtctgggtgtttggtggagctggggttggggctggcttggtgatgagtgtatttcctgtcactttcaggagaaagtggatgaggaggggctgaagaagctgatgggcagcctggatgagaacagtgaccagcaggtggacttccaggagtatgctgttttcctggcactcatcactgtcatgtgcaatgacttcttccagggctgcccagaccgaccctgaagcagaactcttgacttcctgccatggatctcttgggcccaggactgttgatgcctttgagttttgtattcaataaactttttttgtctgttga

SEQ ID NO: 370 - DNA, 379 bp, Homosapiens
  misc_feature: n=a,t,g or c
ggcgagtantaagtttattaggacttacacacagggcactcagcaagacagctcgagagatccggcctcccccaatgtctaaactgcttttcagttaattttctggctctttgtctactatatatgagcaacgagacttttacttggttggttctcagatactctccaggatgtttggattctcagagacacctggtcctcagctgggcaccatggaaatggctcagttacccggccntcagggttcaagcagggggacatgnaccctttaaataanctaaaggggacctggtcacactacaacccaccaccancaatcattcaaagnaaggccnacttgggttgaactcagattacaccccctgggaagggacaaagg

SEQ ID NO: 371 - DNA, 346 bp, Homosapiens
tcagagaaaactcaaactttattgagagaattttcaaattttcagtcacattttcaatgtgacatcagccatgtgtgtagcttcagcttgtcttctttttaacttatggctgcccatctcctgcttctttagtcttagcatgcttaggattaggtggagtcttctcttttacatcagagccatctccacgctcactccgagtcttttccagatccatttcctggcaatcaccttctactttacgttcttcgatcggaggtgttccttctctctcttgtccaggttcaatatcctgattgtcagttggtggttcctcttgctgagattcaccgggagccacgaatgc

SEQ ID NO: 372 - DNA, 388 bp, Homosapiens
ttttttttttgcttaactttttattcatcatggcacaagatagaaccttaagaaacaccactgggaatttcatcaccaacatgaaaattaagagtagcatgttttataaaagaaaaaagaatctttttttataatacactttcccttcagaagtgaaaaaaaattgcataaaatactgaagcgtatcgccatctgctggtcaaaaatagttatgcacttgaaaaacttcaaactactaaagtacggtagaacattttacaatacacataaaattacgaaagaaaacatttcctcagcctttggtacaatgtaagtacaaagctgtaggccttttaccaaatgtgatttagtttttaaggaattgcatgtaatttggcaaatactgatt

SEQ ID NO: 373 - DNA, 402 bp, Homosapiens
tttttttttttttgaaatttgataaatgtttattgacttgctgattcaaaaaaacagtgtagctgagaagtctgatcagctcagaaaagagtggaatttggcaacaaatatgttatccaacaaaatctgagtaatttatcaccttttaacatcttcaacatatttataatataaatattttttaaaaaaccgattattaaactaatactcccctggaagaacaagaggactaattttcggtgacgacagacttgtgctgatccatcatctggaactcctaaagacctgaatggctgactgggattagtgactactatctggttttactggttttactctactaagcccatgattttgtggttttaaccaattaagaaaattatccccaagcacaataaaaat

SEQ ID NO: 374 - DNA, 318 bp, Homosapiens
ttgcacatatactttaatacttaggcttgggtaaaatcattttaaataacatattaaaatatgtttggggggacaacccagcaattgcacagcccactagaaaattttaacatctaagtaatataactgttttagggtctgaaagttctccttcagttgttccacagcctctttatcaactaggcaaatatatttaagcttttaaatttcataatgttggtattttttaaaaggcacgggaggttcacttaatattaaatatataacattcactttcataaccaaaacctttttggcaagtgactttcacatagatta

SEQ ID NO: 375 - DNA, 356 bp, Homosapiens
  misc_feature: n=a,t,g or c
tttttttttgaattaagtatttcatgtttttatttcaaaagaaaaaaggataccaagaagcagaagaatgaagcagttaaaaccagcaaagctgcaaagtaggaaagaaagctgagggagagattgatccgatttcaacgatgtggccacttaatgcaaacacaggggtctgatgctgcaaacctaagttcacatgagtccagtgacttcagcaggtccactggatccnccacagtgacagggccagggcccttcctgctgaatcctaactttacacattctaggncacatgtcatggcacatacagggttacactttatgggttacatggacattggcatgccatttgcacacag

SEQ ID NO: 376 - DNA, 197 bp, Homosapiens
tttttttttttttttgttatatacattttattgaaaaaaaattttacaacaaaatattttggcaaactgtaaaagtatacataagtgcaaatatatcctccttttaaaatacaagcaaagtgtgagtatacacggtcataaaaatatctttaaaatatggtggtagaaaacaaccttgtaaaaacgttgtattgtcc

SEQ ID NO: 377 - DNA, 448 bp, Homosapiens
tgattatggttcctttatttacaagttttttgaacaccatccctgtatgaagcatacattcaaatattcttagcagtgagcgagtttaaccacggaacactgtaaacagatagggcctttaaatattttcatcatctcttttcccctctacattgcatcttttaaaattcgctttggttccttcagggaaatatatatatatataatataatatttatcttttaaaataattccacctcactctcaggctcttggaaggtcaccagaagcttccaagctcagttcaagagccaatgagggctgagtgtggtgctggaacccggtgttttgggggactcaaggccctcatagccaaagctggggacctgctggccaggcccactgctctgcagcccagacactgagcaaatccaagtttcattacgtgtggtggagagtttgccaaact

SEQ ID NO: 378 - DNA, 641 bp, Homosapiens
ttttttttttgatacaactagcaaatgttcattggtttacaacaaacccaaaatactcatcaaatatgggctgttggatttagaaaaataagattcttgagcgattccagctgcatttgtttatacagaacacatttactcaggaccctgcagtgtcagcttcgttctttgggtatgcagccttctatctggatctctgcaggccagccagaatatctgttgttcttagcatcagagtggttgatcttttctctctgaatttcggaagggagttccaagccttttgctgcaataaatacccagctagacctgaatttcatgttcctgatttctttacttccaagtgcttctatggcattcttggcatcgttattcagtcttgtgcttccgtcgtcataggtcaccatgaagagcagggattttggagcagcactctgaataaactttgtcatcggtccagagttatcgccttcatacatatcaaaacatcgtgttgctgtcacattcccagttacatagttgacaatggcaatgtttattcctctggcaacatttcccagctgttctcccataagtaggttatcctcaaagcagattttggcgtacttgcttctgccacctccgctgagtaacctgtaggc

SEQ ID NO: 379 - DNA, 553 bp, Homosapiens
  misc_feature: n=a,t,g or c
ttttttttttttttttttttttttgtcttcttaaattttatttgtgaattcagcaaaataatttctataaaacaaaacagccaaacatttaaatagtataggataggctgtatctatttgcaggtatatttggtttttaaacaggttccaaaatattacacacattcaaaatttaccaattctcttttaaatatagtattaactcacaggtttcttggaatcttaaaacaaatgttttttctaaaatggtaccttagaattacattaaataagcaggagcttagatcttaattaaatcttgtatctaacaacaagagttttagaataatgaaaaaaaactacaacaattctttctttcaaataaaagtgtgactatgaattcagtcagacatcttggtgcaatggtacttcaaagtactatggattcttatgatgtacacttcaccgggattcgngagagccaaggttttagaaacctcccctaaaaaatttctctgggaaaaaaaaatcgcaggcccaccaattcaatcctttatgcttcacacaatctgga

SEQ ID NO: 380 - DNA, 390 bp, Homosapiens
ttttttttacaaagtaaactatgatttttattgtgaaattttcatagatggaaaattgaatattctgtccatttcattttacaattatcttaccacttatttttgtaccatgtatttcaattgcctgtttagtgaaaaataaaaattaaaaaaacctattcatttttggcttgtgtttagcttaaattttatcattaaattaaggagcccacaacaaaatgtgttgccagcagccatatcccaagcccctgcgtgaagaatgttttggctgctatttcaacctaaggaaacaacgtttgacctcagtcaccttaaaatgccagtgtgggcagaagattttttattcctcacaattaaaaaccaaacaaaaccccctaggatcttgaaggt

SEQ ID NO: 381 - DNA, 587 bp, Homosapiens
  misc_feature: n=a,t,g or c
ttcagaatcagatatgtttaatatctgcatataacttaatatgcatttcttccattacaatttttaagtataatccaaggctttaaaaggtatcttttttttacagtaatttaaaattatagaagatgcctttcctataattgaagttattgatcaattgaaggtataaccagactgaaatatacagcaacttcttgaagaatggcaaaaataaagtgaaagttctaaattcttctctgaatttttcagctattgctaatggaaggtgctgccaatataataggcaacacaggttcgtctaacacaggtcggtctaacactggtccnngtaatcaatcatcatatcttatttctttcctttttcttttttgtttttttgagacggagccggcntctggtcgcccagggctgggagtgcagtgggcgtggatctcgggctcactggcaagctctgcctccnggggnccacaccattntcctgcctcaggcctcccgggggggctggggnctacaggggggcccgncaccatggntcggntaaattttttttggatttttaggaggggcaggggtttcaccgtgttagg

SEQ ID NO: 382 - DNA, 362 bp, Homosapiens
aagatctataaatatatttattataatataacaagaacttaacagtaaacatatactatgtacaataccattacagagaaccctgttttatatcattcacagaaatagccagttttgctccagtgtgatagatgaggagagaaacgaatttcaatgtcatctgtgttgagtctcgctgacaactagaacctcctttggcgtcagacgcacaccaatgctaacattagccctgccccaggcagttaggaatttgtgctccagtccttgggttcacacttgcaccctgtttgacataaatactttaaatgacatacaatgtatgtagttttgtgcttattactttttaaaataataaataatat

SEQ ID NO: 383 - DNA, 386 bp, Homosapiens
ttttttttttttttccagcaacactgcacaagttttaatgagttcactgatggacgggcagacatagagtctctggggccttgtttaaagatgtactggaaaaccagtcctggaacttctgtcattggagaaaggtggaggagatcagctctgatatgctgctaactctcctggccaaatccattagaggaaaaaaaatgcttcaagacagggccaggaatgggggtcaggacagaatctagggagtcatcagagttttggcttcttgggctctagtttgatcatgtcccctgaatgtgagaaatgtgcttatctgctgggaccggcatatcctctgtctttacaggaacatagtagtagcccatgatggagaagattcagcagat

SEQ ID NO: 384 - DNA, 399 bp, Homosapiens
  misc_feature: n=a,t,g or c
ttgcagtcagtgggttttatttgangagggggttttctgctgaactgagatggggttgattgaacggggacagagcgaagactggcagagggcacacacgggaccctggccactcccgggaccctgaccactcctaggctaggtccttcatgtcttcagtcaggcgagcctggggccccctgggnatgagcctgcatcctgagtgggcacccccgacccatgacaagcctcctgcaagggcagcttctagctcatggtccgtgagtcactcggggctggtcaccgggcactgggaaggtggccagagccgcgtctggggggccgagccaagcaacagcagcagcagcaggtgggcccaggcaaggcgggctgttgtcagagccttcctgcagctgctgc

SEQ ID NO: 385 - DNA, 297 bp, Homosapiens
tttttttttttttttttacaagccgaagcaccggatgtaatttaatagggtggggaagatactcaagagcgggcatgggacggggcgcagagtccgggttaagggccttacgtagccaaaaggggggatccaggaccctcgggcccccccagccgcatctgcaggttgatgcggtaactcgaagactacagagtgcctggcctgtgcgggagagagattactgtcttcatccagccaggcacggtactgctcaagggggactccttccataggttcctcttcattatccacaaccat

SEQ ID NO: 386 - DNA, 361 bp, Homosapiens
  misc_feature: n=a,t,g or c
caatcantntnactaaaaaattttattgaactggtcaattttctttgccaatattactgtattcttatttctagtaatagaagtgtgaaaaagcatcaaggaaacttaaattgcattctcatactgactgcatacaataattctgaaaacagcggaagttatatatatccctcataagtaaaacatgagtaacacaacaantgaaaaacgantaggagacanttcaaataatggcgacctgttattctcatctngttaagtactattattttctaacagggantttgctatttcaaatatattatctgaggatgtctatatatttatatttngaggtactatacaaatttggggccaatgg

SEQ ID NO: 387 - DNA, 452 bp, Homosapiens
ttttgctagtgcggagttttattggctacaaaatagatgcaaaatgatgagaatctgaaggctgcagtaggaaagtagagctttaccctcataaactcgcactttgattagaaaagtgcaatatattaagagcattatgagaagtctggtgagactgttacagaaaaaaaaaataaaagtttctgagtctgataattccaagggtatcttttagaactcactcactggtgtctgtgcaaggactttccttgggggaaaatagattttacaacaggcggaaactttcattggtctcatgcgtgcttttggatttcattcacttgacaaagaactaatcttccgttgatggtctcctgggttatggccttgatctttggagttgcagacactttcatgctcgactttgattcttcccgtgtcccttcactctctccctcccaggagccgtcggg

SEQ ID NO: 388 - DNA, 476 bp, Homosapiens
  misc_feature: n=a,t,g or c
tttttttttttttctggtttaaggatactttattattgaaccagtatgtacaaactctaacatgaaaataatgagtcacagaatatcaagactatttacaatacttttttgttttttacaaaacatttttacaagattacttctctctaaataatgtgacagacatacacaaaaatccaactttttttattacatacataaataaatattgactttaaatgaccactgtaagggacatgaattctacagaccacttggatgagaaggtagcagttttgttatctgcacactacaatataattaagtaaaggggaaaagtaactttatatagacctctgttaatcactccgtaaatcatataactcactaggaatattcagtaggaggtaaggacagtcatgaggattcctctccgtaccngacaccgngtctggacctggcaaattcacaggtaagggtccacctctttntatatc

SEQ ID NO: 389 - DNA, 235 bp, Homosapiens
  misc_feature: n=a,t,g or c
gtgctgaccatttattgggacttgactgaccagggcttgtaagaatggacacaaaacttcaagtctttcgtaatgaaaggattgattcaaaataaatattctaaaaattatgtcaaacactaatgaataagtgacatttacaaatagtttataagngaatcatttgggtgaacaattttcatttcacaaattaaatagctcatatccanaaaagacacctctccttaagcaggga

SEQ ID NO: 390 - DNA, 317 bp, Homosapiens
atttatttatttttagcaagaatgtacaattctttttgcaattttttgctaacaaaagacaaaaagaaatagtgctcccttcaatttagtagcaataaaatcatctatcttcatctctctcagagggcttagggagagtgaaaggaattagaggaacataaaccatgggtccttcaggtaaaataagtcatttcatagtgatggaggcaacagcaggctacgctcttgtctgcctgtacgctcagcatcagcatgccctgcccctcctcctcccacataaggtgcaccaaagccttcttttcttctacaacagagtc

SEQ ID NO: 391 - DNA, 3833 bp, Homosapiens
gtgaattccgcaccatctctctcctgcctgtggggtttctgtcaactagtcgtggagggaaggagactctttaaagaataacatcttattgtggccatgccagaacccactaagaaagaggaaaatgaagtgccagccccagccccacccccggaagaaccaagtaaagagaaggaggccggaactacaccagcaaaagactggacccttgtcgaaactcctcctggggaggaacaagccaagcagaatgccaactcccagctgtccatcttgttcattgaaaaacctcaaggaggaacagtgaaagttggtgaagatatcaccttcatagccaaagtcaaggctgaagatctttctgagaaacccactatcaatggttcaaggaaatggatggacctggccagcaaagccgggaagcaccttcagctgaaggaaacctttgagaggcacagtcgggtgtacacatttgagatgcagatcatcaaggccaaagataactttgcaggaaattacagatgcgaggtcacctataaggataagtttgacagctgttcatttgatcttgaagtgcacgaatctactgggactactccaaacattgacatcagatctgctttcaagagaagtggagaaggtcaagaggatgcaggagaacttgactttagtggtctcctgaaacgtagggaggtgaagcagcaggaggaagaaccccaggtggacgtatgggagttgctgaagaacaccaaacccagtgagtacgagaagatcgccttccagtatgaatcaccgacctgcagcggcatgctgaagcgactcaagcgcagcatcagagaggagaagaagagcgccgcttttgcaaaaattcttgatcctgtatatcaggttgacaaaggaggcagagtgaggtttgttgtggagctggcagatccaaagttggaggtgaaatggaataaaaatggtcaagaacttcgacccagtaccaaatacatctttgaagacacaagatgccagagcatcctgaatatcgataactgtcagatgacagatgattcagagtattatgtgacagccggtgatgagaaatgttctactgagctcttagtaagagagcctccaattatggtgaccaaacagctggaagatacaactgattattgtggggagagagtggaattagaatgtgaggtgtctgaagatgatgcccaagtaaaatggtttaagaatggtgaagagattatcctggtccaaacaagataccgaattagagttgagggtaaaaaacacatcttgatcatagagggagcaacaaaggctgatgctgcagattattcagtaatgacaacaggaggacaatcatctgctaaacttagtgttgacttgaaacctctgaagattttgacacctctgactgatcagactgtaaatcttggaaaagaaatctgcctgaagtgtgaaatctctgaaaacataccaggaaaatggactaaaaatggcctacctgttcaggagagtgaccgtctaaaggtggttcacaagggaaggatccacaagttagtgatagatcatgccctcactgaagatgaaggtgattatgtatttgcacctgatgcctacaatgttactctgcctgccaaagttcatgttattgatcctcctaagatcatcctggatggtcttgatgctgacaacacagtgacagtgattgcaggaaacaagcttcgtcttgagatccccatcagcggagaaccacctcctaaagccatgtggagccggggagataaggctattatggaaggcagtggccggataagaacagaatcttaccctgatagcagcactctggtcattgatatagctgaaagagatgactctggtgtttaccacatcaatctgaaaaacgaagctggagaggcacatgcaagcatcaaggttaaagttgtggacttccctgatcctccagtggcaccgactgtgacagaggtgggagatgactggtgtatcatgaactgggagcctcctgcctacgacggaggctctccaatcctaggatattttattgagaggaagaagaaacaaagctccaggtggatgaggctgaattttgatctctgcaaagaaacaacttttgagcccaagaagatgattgaaggtgtggcctatgaggtccgcatctttgcagtcaatgccattggcatctccaagcccagtatgccctccaggccttttgttcctttggccgtaacaagccctcctactcttctgactgtggactctgtcactgacacgactgtcacgatgaggtggcgccccccagaccacattggtgcagcaggtttagatggctatgtgctagagtattgctttgaaggaagtacatcagcaaaacagtctgatgaaaatggggaggctgcctatgatctgccagctgaggactggatagttgcaaacaaagatctgattgacaagacgaagttcaccatcacaggtctgccaacagatgcaaagatctttgtgcgtgtgaaggctgttaatgcagctggtgccagcgagcccaagtactattctcagcccattctcgtgaaggaaatcatagaacctccaaagatacacagtcccaagcacctgaagcaaacatatatccgccgagtaggagaccgtgtcattcttgttatccctttccagggaaaaccaagaccagaattaacttggaagaaggatggtgcagaaattgataagaatcaaataaacattcgcaactctgagactgatacaatcatatttattagaaaagcagagaggagccactctgggaaatatgatctgcaagtcaaagtggacaaattcgtggagaccgcatcaattgacatcagaatcattgaccgtccaggtccaccccaaattgtgaagattgaggatgtctgggggagaaatgtcgctctcacatggactccaccaaaggatgatggaaatgctgctatcacaggctataccattcagaaggctgacaagaagagcatggaatggttacgtgtcattgagcatatcatcgaaccagtgccacatactgaattggtcatagggaatgaatattacttccgggtcttttctgaaaacatgtgtggcctcagtgaggatgccaccatgactaaagagagtgcagtgatcgccagggatggtaaaatctacaaaaatccagtgtatgaagactttgatttctcagaggcacccatgtttactcagcctttggttaaccgcctatgccatagcggttacatggccaccctaaactgcagtgtgagaggaaatcctaagcctaaaataacctggatgaaaaacaaagttgctattgtggatgatccaagatacaggatgttcagcaacctgggagtctgtaccctggaaattggcaagcccagcccttatgatggaggcacttactgctgcaaagcagtcaatgaccttgggacagtggagattgaatgcaaactggaggtgaaagtcattgcacaataaggatttttggaatgtataatatcatctaaggtgggctctccttctgcagactcctcttgcaaggcgtacctccaaacataattgattgctatctgcgagacttacactcaagcaatcctgaggaatactgagggagggcctggctactgtctctctgcactctgctgctttgaaatctggttgaaatgagaaaaagcattttctgttttcccaccaggcccccaagtgtggtctttttctttcctcctaatgttgaagagaaaaaaaaaaaaaaaaaagtttgcccagattgcttaattaaaaattgcaaacaaaatctc

SEQ ID NO: 392 - DNA, 493 bp, Homosapiens
gataaaggggttgagcatggaggtgaccaccgtgtacatcaaagcagccaaagaccctttctgggggaagatgacacatctgaactgaggtaccctccaacacctcttccataaaatcagcaaacaactgacaggtgagacccacaggtggagaaggctttatacttcccacctgatgatgaaaccctcagaatggaggaaacaattttatagtaagagaaaagggtccccgagatgggaagaaaaccaaatatggcagtagggaaatacatgattatgttattgatgaaggtgtcacaacggcaagatgggggagttgagaaaggtcacagaagaaattaggaatgtccacctccttgaagcaggtcattagtaaggcaatcaagttgtacagctgggagtctaaaagactgagaaaaaaaaaagaccagcaaactaggaagcccacagaacacaggttcatgatggctgaatgatatagagggtgacagat

SEQ ID NO: 393 - DNA, 813 bp, Homosapiens
agcagcccggggcgcggtaggccgccaaagcggaagaagaagcagcggcggaaccgcaccacgttcaacagcagccaactgcaggcgctggagcgcgtgttcgagcgcacgcactaccccgacgcctttgtgcgcgaggagcttgcccggcgcgtcaacctcagcgaggcgcgcgttcaggtctggtttcagaaccgccgcgccaagttccgcaggaatgaaagggccatgctggccagccgctctgcctcgctgctcaagtcctacagccaggaggccgccatcgagcagcccgtggctccccggcccaccgccctgagtccagattatctctcctggacagcctcgtccccctacagcacagtgccaccctacagccctgggagctcaggccccgcaaccccaggggtcaacatggccaacagcatcgccagcctccgtctcaaggccaaggagttcagcctgcaccacagccaggtgcctacggtgaactgaagtccagtccccccaggacccagacgcctccctgggtggacagcaatagaaaagggggcagacgcccaggaagtgaccttctcctggatgagctctcctggcccgtctgtccagcctggactcccgagcccacgaggctgttgaggcccctgcagccgggcgcagctcttctgtccttggccaccagagactgcagcccacaacccttggaggggttgggccggaaggtggaagagcctgccaaggacctcatttagtttgtgtattaaaaccaaaaagcttttgtctttaagaaataaaaccatttttttaagcccc

SEQ ID NO: 394 - DNA, 354 bp, Homosapiens
aaagcttcattccacagcttttattctataagaacataaacatcgtctttttccacgcacagcagcaatacaatattaatttattctgatttaagattagaagtaaatagagctagaactaacatttataataacgatagaatgcatttgcttaaaacaagattggcaattcttcataataatagacatttatacagatttgtatttatagtttttttctttttctgcatctacaggtttgacccttttatgcatgtaacttcacagtataaaggaaatccaaacaatgtctcccttctctagtttattccgcttaccccagtcctcctaggcttctgtgaatttcagaaagca

SEQ ID NO: 395 - DNA, 251 bp, Homosapiens
gaaacatgattaattttaatgtttatccaccagcagaaaaaatttaatatgtaaatccaccagcagaaaaaaaattaccaaaactaacattttacagatttttagtatcaaagcacaatacatttttcatagaaacaaatatatcaccattataggtaccatgatatggcaatatttatatacaaggtcatttaccatttaaaaaaaaatcagtggcaatggtaatgtaatacattagttcatctttgttc

SEQ ID NO: 396 - DNA, 410 bp, Homosapiens
  misc_feature: n=a,t,g or c
attatttagntgaataatcatttattgaaaacctactatgagcaaggactgtgcaaagccttggggatacagagataatgaagacaccgttctgctctcaaggagctcacattctaaatgggacagacaagttttcaacaattataatacagtacaataaatgtgagaatatacgtattcatggaatactgcgggatcataaaggacagacacctaactcagcttagaagaactttaaagaaagctgagtataaaagaatgaagaggcattagtagagtggatgagcagggtgggtnacagtgaagggcattccacgcacagccaaaccagcacgtgcnaaagggtncagaggtttgcggagaccctggggtaccatctgggggaatgggtnagttgatcccncttatgg

SEQ ID NO: 397 - DNA, 344 bp, Homosapiens
gacaagagaaatttattactaaaaataaagcagctgaaggttttcccagggaaaacatcaccacaggaccttccatgatgaaatacgttagtatcttctttacttctgaattgctgccttctttcatatacccaaaattttagtttaagttaaattaatcacgacaaaaacgatgtggcatctgatcccttcttgttcaatctgaagactgaattgggctaccctgtgatggagacttcaagtgctgcaggtgagtatctaccaagggttcatgtgtcaggtacatgggctggtaagaagacacaaaggctgcaggctgaagctctgggaggtccaaggatcct

SEQ ID NO: 398 - DNA, 334 bp, Homosapiens
ttatttttttgaaaataaccaaatatgaaaatgtgttttatttctcagtacaaagccagatactgtaaggctatgaaaaactgactagccagaggccagaaaggacaaaaagaagactatctctggcctggtgccctgtgatctggcgtggtgtcacaggaggtctggggacagcagcaaagacctggaccggtggaggtggatgagggaagcgatctgccagcccttccagcctcccgcggctggggcctgaggatcctgcctgcctttgggggccactggttgcctggcctggctggttccaggaatgaactgggagaggacaggaggtgca

SEQ ID NO: 399 - DNA, 346 bp, Homosapiens
ttttgtttataattttttaattaaaaatttttaattgacacacgataattatacatatttatggggtacatagtgacattgcaatacacaaaatatacagtgatcagattagggtaattagtatatccatcatcttaagcatttatcatttctttctgttgagaacattcaatatcctccttctagctatttagaatatatattattgttaactgtagtcatcctacagagctatagaacactacaacttaatcttcctatctagctgtaattttgtatcttttaacaaatttcttcctatcccccattaccttttaaattaaatttattttaataattaggtaac

SEQ ID NO: 400 - DNA, 439 bp, Homosapiens
  misc_feature: n=a,t,g or c
caatctnaaaaaaatattttcattatgtttattataaaaatataaatgtttccactacaaatcattttacattagtaagaggccatctacattgtacaacataaactgagtaatattttgaaaagacaagtttaaagtaaacacatattgccaatcatatcacatttatacatggcttgattgatatttagcacagcataaactgagtgagttaccagaaataaataatatatgtaaatcaaatttaagatacaaaacagntcatatgggtacataacatcatgtagggagttgtggcctttatgtttactgaaagtcaatgcagttccctgtaccaaagggatggccgtaggcattctaggtaccctctnctccctgggttagggaatccgtacacttatggtttaccatatggtccgggggtaggganttgtggtaa

SEQ ID NO: 401 - DNA, 457 bp, Homosapiens
gctgcgcggacgtctttatttttcctgggtggggagcaggatacacagccacactgcagtcacttagcttgtaaaaatatctcaataaataaaacaaacaagcaacatatacactgaacagagaatattttttttaaaatggctagccaagcaatcacggagaaaggaaaagaatagcggcgtgaaagtaagaattccaggctgacttgaaacaatcatgcagaggctcgggggaggggaaggaactcgggggtcctcttctgagagccttggtccagtttcaacagaattgtacaagaatgcatttctgttttattaaaaaaatagacattaaaaaaggcacttagagggaaatacaaattcaaaatccaaatcctcataaatgtgttcctggaatctagacattttcagaaagaataaacctccccccaaacataagacccagaagaaaaatcca

SEQ ID NO: 402 - DNA, 547 bp, Homosapiens
  misc_feature: n=a,t,g or c
ttacatattgtgtatatgtttttattttcaaatgataaactctagacatatattttgcaaaatgagcttgggtttaaaaagtgctttgtgccaaaaatatcatacctaatttttatagtgctttactatcagaatttatattgtttattatatcttttaaaagcagtaagcagttttcatctgacagcgtagataaaagaggagtataggaatttgaatgctagagcatctcccaggtgagccttattgcagatctttttgatatagtcacccataagcatggtgagctcctgctctcataaggtcagccaaagccccttaagaaggtacacagcacatctgcagtcattcaggaggtcctgtgaagtgtggtgatgcatctaacaccttttgctgctcactggagaacccagctttgaacttacaagattacactaaccatttttaaagtgcnccaaaatattantattagtcctaactaaaattacntattttataatgcccctgcnactcctnaaccatccctttgggttacncattttggtat

SEQ ID NO: 403 - DNA, 403 bp, Homosapiens
ttttctttttttctttttttcctttttttacttacattaaatacatcggtaaatcagcagtcgcattctgttaccacgattgttatgttcggagaggaagaaaggcaaatgctttctcagaagcaaaacaaaaacaaaaaaccacaacacccccccttaaaaaaactgaccagaagaaaaaaatgagctgggaaataaacaaaagaaaactaagatccccaagcccaacagagctcaaaggaaggcagaagaggtggtaggaagtagagggaaggcagccgatacgccagaagctaaggccaaatcctgttcctatgggggttgcgggagggagaagcctggggaagtggtttcccaggcccaagataatgatacatcttcaatcctgctccaagggggaaag

SEQ ID NO: 404 - DNA, 417 bp, Homosapiens
ttttcctttgaatggtaactaggatctttattttcatcttgtgaggactcttttgcctaagctggttcccaaatcatggagggaaatctggacctggcaccgggaagggaacaaccttcccaaccttcattgctaggttggtccccagcgcctgggagggatgggtcagcccactgagttattgatgatttccttcctaatttcagtttccactatctctgggttgcagctggacttgtgggagagcacagtgcaagagacaggaataagcagggtaaggcagttcggaggagggtccagtacgccaacagcaagaactcttgggcagtggtgggcccagggcagcccctcactccacgttacggtacttggtgaagaggttgtacaacactcgtagtgtagattcaggtcacagtt

SEQ ID NO: 405 - DNA, 437 bp, Homosapiens
  misc_feature: n=a,t,g or c
ccctcaggttcntntttcactgtcttttatttgacagctagcgcagtctttggggaaatttgtgggtgatttgagtagtaacagcaaggacatcactgtaattatgatagtgccttatatttncctagcacctctcccaaggacttatgaagacttttagattcttcatcccttcacacaacattgcttcaaggtagggccaaggcagaaattatcatcactgttttacaaggaaagacactcctgtgcggtctcaaagcaaatgcttttaagagctaaaaattcatttcctagttctgttcaccaaatgatgccttctttaaacataaatacaaatngtaatgttaggcagggtgctatttacaggggggaaacaaaggggantttttacaataggcggccaacactgcagctggccaaaaatccccaggncagga

SEQ ID NO: 406 - DNA, 305 bp, Homosapiens
ttgttttttgtaatttcagttagtttattaagatgatccaaacagatttagcttaagatatgaggacaggacataaaacaagatttggctgagctagataaagaaaaccaaaagagtgacaagattttcaattggtgacaatttaaagtcatttattaactaatataaaaataaatctacgatagaaccatgacttaaactgagccagtatgtggtacatgtgtcacccaaagtcagcaaggaaccattcagaacttacaccctcctggactggctcacacggcctgtctttgatctggaacctc

SEQ ID NO: 407 - DNA, 193 bp, Homosapiens
tgttctacttttaaagatatttaatgatgtttttcaaatcagtacaaaaatttaaatacaaaaatgatttgctattgacaagtctcaaatctgtcatgggaactcaaacaagttaccagtctgttcaccgttcattgtattctataaaatatttgataacagtcacccactacagacattcttttcccctgtg

SEQ ID NO: 408 - DNA, 276 bp, Homosapiens
gaaatgttttcccaccttgtgtctctagcttggattattcttggacacatgtaattaattggaggggcactcctaagtaggcacaattcccatttaatgtggaataaaaggcataaaatgctgttaggaagaagggtggtggtttctttgatattgtgaaatgcaaagaaggacagcagcacatttggaatgggaaccaaaagagagctgtctggcaatgcaccaggacagccaacatcttggtaagttatatataaacttgtctatgacaaagga

SEQ ID NO: 409 - DNA, 356 bp, Homosapiens
  misc_feature: n=a,t,g or c
agtggttcgaagcaacacaaatttattaccctacagtatgtaaattagtcccacagtgctggttccttccagaggctgagggacagaatgcgttttcttgcctttnccagcttttccagaagcggtccccaacctttttggcaccagagaccggtttcgcggaacacaatttttccatggattggggtcggggagggatggtttcaggacgattcaagtgcattgcatttattgtgcactttatttctactattattacattgtaacatataattaaataattctacaactcaccatcacagagactcagtgggagccctgagcttgttttcctgcaactagacagccccatctgg

SEQ ID NO: 410 - DNA, 262 bp, Homosapiens
gcgccgccagactgagcagaatgagctacatgctacacatacacacacgtggatgcatatgtacataccatggcagtgtatgccgtgaaggggtgtctcgtaccatgcagacatgaaatagcaaacagggctgaggtgttggcaaaaagacagtgtgcaggacctgggagggagcaggggagccaggaaaatttggactagaatatacagctgagatggagacttcagggggtgcccagttcaagccaatggcagaagacgc

SEQ ID NO: 411 - DNA, 364 bp, Homosapiens
  misc_feature: n=a,t,g or c
atacatgtttattncaaaaccacaagcacagtaaccataatgtcaacataaccgtatttcctaacggaacaggagatcgccatgcctaagtgcgtgcgtttnccaaagaaatggcggcttatttggaagctcacacgctgcaagtgatgacgagaagccctgttgtgaactaggagttctaaaccattaaacatttaattaccactttggcaaagcaatgcacattaccatttctacaattggaacagcacaggagattttaaaatgcatctttattttttagaatcttcagtatncacaatgtgtaaaatgangcagcattttaagtaaagctctatgccaaaaacagtttcttaaaaaagtc

SEQ ID NO: 412 - DNA, 229 bp, Homosapiens
ctgcacccaaacagacacatcaacgcaccccactcacagacaccccttaccccacccccactgtgcagagaccaaccatgacacccatcaccaccaccaccacggtgaccccaaccccaacacccaccggcacacagaccccaacaacgacacccatcagcaccaccaccacggtgaccccaaccccaacacccaccggcacacagaccccaagatcgacacccatcac

SEQ ID NO: 413 - DNA, 371 bp, Homosapiens
aaaaatatataatttaattccacattaaagccaagctatcgtggtgggaagaaggtgtaaaaatcggtggaaaccctgaaggccgagtacacacacgaagagagagggagttagctgagaagcagcatccagggaaagaaaggtctccacaagctgagatgatggccctctgccctctgaactgttcattaacaagtcaccagtcccagttctttgttcaaatcctcaaacttggagaggcactgctccaatgagacagctacagcaaccacagggaggaagtgctttgggctgcaggagagacagtcaaagccaaatcacgtccaggcgggatgaagtaaacctggaccgaggagcctgacccagctgcg

SEQ ID NO: 414 - DNA, 476 bp, Homosapiens
  misc_feature: n=a,t,g or c
tcgtnncntcggttctgagaaataggcactggcaatttacacatgccttgctgtgtaatctcactatatttgctcaggcaaagtgggagaagcagccttaggttttcattctagagatgccggctttcccacctgatcggcttagagttcacgattgactgttttgggcttcatttcaccctctacataacaagcgggtggactagatgccttagcaagggtccgtgttgtgtggtgtctccagccacgcactcagctcaatcttagcacagttaaaaaatgcctttctagcaagttatctgcccagtgcctgaaaaagtatcatttcttgtgttcaataaaaaagcctcctaatttaatcaaggacctatggagataactgtcttttagttgtggcattgcaaggatacaaatgcagagatattttaaaagtgatccttctgtaagagtgaacccacgatatgatctggnagcaa

SEQ ID NO: 415 - DNA, 242 bp, Homosapiens
  misc_feature: n=a,t,g or c
ggaaatttatttttaaaaaaggtagaagaaaatacctggnaaactattttaaatatatatatatatatctatattttaaaacaatagttaaggtaggcatccaacagcaaactgaagctattgagaaagatcttgcaattattgttgtgggcattttcccccaaaataaaattaatatttgaaaatgctcaatagagggttttttaaagcatagnaatgatatctttcctgttcatgtgtga

SEQ ID NO: 416 - DNA, 123 bp, Homosapiens
gatctaaagagaaactgtagattgttttcctgacagcaaaagactaatgtgacaaaatgaagtcattgtaaagaagcgatgcaacttgtcaaatatttaataaagaattatggaagctggaaa

SEQ ID NO: 417 - DNA, 2058 bp, Homosapiens
cggtttctgctgggtttctgaactgctgggtttctgcttgctcctctggagatgcagcgtctgttgactccagtgaagcgcattctgcaactgacaagagcggtgcaggaaacctccctcacacctgctcgcctgctcccagtagcccaccaaaggttttctacagcctctgctgtccccctggccaaaacagatacttggccaaaggacgtgggcatcctggccctggaggtctacttcccagcccaatatgtggaccaaactgacctggagaagtataacaatgtggaagcaggaaagtatacagtgggcttgggccagacccgtatgggcttctgctcagtccaagaggacatcaactccctgtgcctgacggtggtgcaacggctgatggagcgcatacagctcccatgggactctgtgggcaggctggaagtaggcactgagaccatcattgacaagtccaaagctgtcaaaacagtgctcatggaactcttccaggattcaggcaatactgatattgagggcatagataccaccaatgcctgctacggtggtactgcctccctcttcaatgctgccaactggatggagtccagttcctgggatggtcgttatgccatggtggtctgtggagacattgccgtctatcccagtggtaatgctcgtcccacaggtggggccggagctgtggctatgctgattggcccaaaggcccctctggccctggagcgagggctgaggggaacccatatggagaatgtgtatgacttctacaaaccaaatttggcctcggagtacccaatagtggatgggaagctttccatccagtgctacttgcgggccttggatcgatgttacacatcataccgtaaaaaaatccagaatcagtggaagcaagctggcagcgatcgacccttcacccttgacgatttacagtatatgatctttcatacacccttttgcaagatggtccagaagtctctggctcgcctgatgttcaatgacttcctgtcagccagcagtgacacacaaaccagcttatataaggggctggaggctttcggggggctaaagctggaagacacctacaccaacaaggacctggataaagcacttctaaaggcctctcaggacatgttcgacaagaaaaccaaggcttccctttacctctccactcacaatgggaacatgtacacctcatccctgtacgggtgcctggcctcgcttctgtcccaccactctgcccaagaactggctggctccaggattggtgccttctcttatggctctggtttagcagcaagtttcttttcatttcgagtatcccaggatgctgctccaggctctcccctggacaagttggtgtccagcacatcagacctgccaaaacgcctagcctcccgaaagtgtgtgtctcctgaggagttcacagaaataatgaaccaaagagagcaattctaccataaggtgaatttctccccacctggtgacacaaacagccttttcccaggtacttggtacctggagcgagtggacgagcagcatcgccgaaagtatgcccggcgtcccgtctaaaggtgttctgcagatccatggaaagcttcctgggaaacgtatgctagcagagcttctccccgtgaatcatatttttaagatcccactcttagctggtaaatgaatttgaatcgacatagtagccccataagcatcagccctgtagagtgaggagccatctctagcgggcccttcattcctctccatgctgcaatcactgtcctgggcttatggtgcctatggactaggggtcctttgtgaaagagcaagatggagcaatggagagaagacctcttcctgaatcactggactccagaaatgtgcatgcagatcagctgttgccttcaagatccagataaactttcctgtcatgtgttagaactttattattattaatattgttaaacttctgtgctgttcctgtgaatctccaaattttgtaccttgttctaagctaatatatagcaattaaaaagagagaaagagaaaaaaaaaaaaaaa

SEQ ID NO: 418 - DNA, 650 bp, Homosapiens
  misc_feature: n=a,t,g or c
tttttttttttcctttaaatccctaatgttcacaagtcatcatgtggaactaaaatcacacacaaaggcaaatcatgaggaaacgttaaatatttcaaaatgcccacgaggcgtgccagaaacagtgctgtatctatagcacagaatcgttggaggccaaagctaaagcagtaggggctactgcaacttctagctctttactgctgcttttttgtttgtttgatagagggggattcaggtgagggggttcggtctctcaggaagttaggccataatttctgcaggttcagtgattaacttggatccatcccatgctgtcttgaactgttcaggaatgggaaattctctataatcaccatcctgagggataagtatgttcatttcagatgacttggcgctcacgatctcacagtctaatgcatcttcactgaggtatatgtggcaaccttctgtcttattaatggaaattgttggcactctccccattacctggatttgaatgtcctgggagttgatcacttccacnatgcccaccacattggcnaacaccagccgagtttttacagtggccattatcctcgtgccgaatttggcccgaggccaattcctatngggcggattaatcgaaccagcaactgttccggngaatg

SEQ ID NO: 419 - DNA, 498 bp, Homosapiens
tttgctgtttcttgactgttagttgggccttggctaatgtcatacccatgggctgccacatgggggtggagggatcaggacgaagagaggggaccagagcagggatggaggtccagactcagggagtcggcgcttcttgcagggggttgggggagaggacacggaagcctctgccccatgcaggacatttccttgctgtggcagcagggcagctgtgccctgactaggctgggctgcagagagtgtgagtctcaggtcctctggagccagagccatcaggatgactgcttttcaggggtcatcagtcgctccacctcccgcatgaaccgcagacacaactcttcttgccagggcagagcacacactgcacggccaccggagccccacactcttcttcatgcccttctgcagcatcttgtcccagatatccccaaagtagcccctgtaatgttccatctgggcctcgtcctcagcagtcaccgtggtgacaggcaccac

SEQ ID NO: 420 - DNA, 334 bp, Homosapiens
ttttttttctttttcttcttttaattttgttcagcattaaaggagggaacttcataaacattgattgtcatttacagaaaacattcagaaatcatgtgtgcattatccgggaatgctaacagtattgaactaataatttacaggacataaaataaggacaaaaacctattacattctaaagtaatataaaactcttttttaattgttagggagtgctgttttattctagtatatttatgattaaaaaaactcaatacttacttcctaaatgactcaggctgcagttttactcacatacacagaaattagggcttatatatttaaacaaggggag

SEQ ID NO: 421 - DNA, 316 bp, Homosapiens
aaaattaataaaaatattttattgaatttcaggaacttggtacttttttaaaacttcaaatctttgcacacaaatcaccactatactttctagaatagtggaagttaggacttcaagattgtcacttatctccttgtgtcacacagcacagaaaccccaagtcctcacactgcccccaccccccttctggccatgactaccaactactctgttattctagcggaggacaatgacggaagtgggtagacgactgaaggagatcagctgtccaccgcgtactctactaaagtgagaggaggagcaaccgaggatcatg

SEQ ID NO: 422 - DNA, 445 bp, Homosapiens
  misc_feature: n=a,t,g or c
catttccagagtttattgcattatacatgcgaccagaacatgcacagaaaggacaggttgctgttgtacttctaccaaaccacagatgcaccacaagggaaaggctacaaggcataaatcgccaatatcccatctcaccaaggacaactgctaaattcatttgtgaaaagatacattgtaatgtgctttttaagtccccctccctccaacttgtgggttttcttaatcttttttttttaaatatatatgtcatttttaaagtactggatgtattcaaaatgccatgagttcatggactaaccacacacatagaccttttgtgttaggaaagacatgaaaaagtcacatttgcngggatggatggatggatgggatgctctacagttccaataagtttaagaccccaatgaaaatgcgcnataaataagttaccccggcattacgg

SEQ ID NO: 423 - DNA, 365 bp, Homosapiens
  misc_feature: n=a,t,g or c
gtgtaaatacactttattttccatttttcccgcctgganacatgtgaacaggcagtgtgcaaaatggtggcgggcagtgtagggggcgtgtggagagcgctgcgtgcactgccccggatccccaggcttcgtaacactgaaaagtggccagctaggaagcggggacagagcaggggtcccacccaggaagcgccaggagattgcttgtgacgctactctactggaggctctgggacanccgaggggggacagccagnnggtacatgaggtccgtgggtgggnaannngggagagaaggggcctggggnggcatcgttggattttggcaccgtttctcagttctgattcagcagagacaacgggac

SEQ ID NO: 424 - DNA, 324 bp, Homosapiens
gactgtgaggaatttttattttcctttcatgttcactaattgcaagctttcttcatttcggtaatatctaaaatgatctcctcttgtcggaggtagattttcccagtagcttctaactcctgacccagaagcggtgtattgcgcctcagcatggaggaggacgtgaaggcgtacggagtctgggagtagtacaccacgtaggtaggtttgtactggtttggctttgtgtactgtgttccccaggcaattcgaatccagactgcattctcctcagtttctctgaagctgactgtcacattttttaatgctctctgaagaattttc

SEQ ID NO: 425 - DNA, 345 bp, Homosapiens
tccatgaattcaaagccttttaatgatgtgaacacttactccccatttcttttttacattgttacaaaaaatttacatacagttttctgaaagtggcattttgttggttgttattatactgatgacacatattaacactttgtattgaagaagtatcataaaaatcacagggcattacagatttttgataagaagtagtaatagcattgtcttttaacagctggaggctcccaggcatactctttggtgagaaatgattaattttatattttcattttgatgagaatcttttcttgtttttaccagttataaaaacaaagctttttctttgttgtgatactgtgg

SEQ ID NO: 426 - DNA, 316 bp, Homosapiens
ctttgaatgaatataaagagtttattcggtgcgtatttgggtatacaacaacaaatattaaacaacttttttaaactttttgtgcacaggacagaaaactgcctgtacatgctatgtccacttttggaacacagatttttaacaattatgaatgcacaaaatcttacatatcatgcaactctatgccaagaacccaactttcttccatgcaacagatatgaagatctaaatggaaacctagctaagtcttaaacacttttccagtagcaagtataatatatgttgttgagggaaaaccagtcttaacaattccttg

SEQ ID NO: 427 - DNA, 383 bp, Homosapiens
aaaagctacaaatttttatttagctattattaaggcacgtaggcacacggacagaacaggtctcataggtaaccagttgtgtttcctaatagggtgaatacatatcattgccatgaatacatcttttatcataaaatgccaatgagcatcaaaagtaaatggtttgattgttgttgtcactgttttgtttaagaaaaatagggccttaaaataagtgcttcagtggaattcttgaacagtaagtagcctgttgatagtggacctagtttaaagcaccacacaacaatgtgtgtttacatcacccctttatttcatagttagaactaatacagttccacagggtaaattgtcaataaataatggtgtttaatcattaaacataa

SEQ ID NO: 428 - DNA, 280 bp, Homosapiens
ttttttttcttcagtttttcttcatttctcttcgctgcaaaatttttttttttgtgatggtgggtttttgttttattttttataaaacacttgcactcaagaacatacaaacagtggccaccaatccccacccctggggctccggggagccccctggcttgtttgtggctgttttcctctgtcccttccctggcatctggtgccagagggcaggtgcgggggtcctggggcgggtggaatttgtacagcactttcatggggagatggtcacaagaaagga

SEQ ID NO: 429 - DNA, 260 bp, Homosapiens
gagctgtacacttttattgttccttgtctctctacccctgcccagggtaagggcaaacgccttccaagctgtccaagggcacccgcctggccatggttaggttctcctagttgccctctaccagcagccgtgtgtgggtgctgtcctggccggcctggcagcagtaagtgccttggtcctcaggtcgaacgtcatggatgaccaggctgtgggtggggccgtggctgcgcatctcatacttatctcccgggcacagctcg

SEQ ID NO: 430 - DNA, 330 bp, Homosapiens
tgtggataaatatattagcaaataaatatatttcttaacatagtgcctgattcaagcgtctgtctggttcagatataaatacccatgtgggtacctaggtgctagtctccccactaactgagggaaaaaggttcccaggtggggtcctctgcccactttgccaccacattcacattccaaatgggataatgcctgaggggccaagagtggtcaggctgccctggggtgaatgtcaccctgatgaggcccatcagctcttgtccactcagtgaggccagacttgtgctctaatccactctcctgtgggtccctggcctgtatggcttatac

SEQ ID NO: 431 - DNA, 538 bp, Homosapiens
  misc_feature: n=a,t,g or c
ttttttttttgctagtcacaaagcccaactttttattgaagtataacatacacacagaaaagtgcccagatcaaaagtgtacagctccaagaatgttcacaaacggaaagcacccaggtaaccgggcaaccagatcaagaaacagaacaccccaggaagcaccacctcatgcccccttctggttactgtcttcttagggactgatctctacttggcaaccgcatgggatggaattttggctggggttttaaactttatataaatgggaatcctatgggtgcatttttgccttatctcgttcaacactaggggttgggtgaatacacttccaaggttggggggtgggagtttgcaggcttcatttccccatttgncagtctnggggatttcccttcgtgtggaaatattacccctaattgtggctttattcccggnccaaacnggggggctttggggggtgtttttcccgtttncaggggtttttttttggggggagtttttttttgtngaaggttttagggggcttttttttntgggg

SEQ ID NO: 432 - DNA, 495 bp, Homosapiens
  misc_feature: n=a,t,g or c
gtggagatggagtatgtatttattttacaaaaataaatcaccatcttcggaccatttgtagactggaacatttcgagcaatgagtgcgccacacggacgagtgccctggtgactccctgatgttcgcgtcacccccagggccaccttggcgcccgcatgagcctcgnttcccactcccggcctccaactcccttccctcgcagccgccattcaccttctgctgtttatttgtctgcagangcctgggacaccggaaaaggcgattccctgagcgcctgggagttggagacaattcctggttcagaatttaaacatctttctaggtaagcgntgctccaaaactcttcgccgcgtgggacttttgcaccaggggcggttggggagganttggccctccacggttcctgggcaaccgcggcctttttgaaagaggttctggtcaatatttaacttcggaggaatttggaattggattcctttaagttcttnccctgc

SEQ ID NO: 433 - DNA, 422 bp, Homosapiens
aaaggaaaaaagtaaaattgtttattttcctcccaagcaaaacaaaatgaacaagttcaatcaaaaacatcccaatggaaaaaaatcacactaagaataaaacacttacagaacggcaagaaaactgggttaacatataaatttgtgtctgttgaaaccagagtacatgctagaaaacattaacacagatacgacagagtgtggtttttttttagaaatgggtaatttctctctccagtatcctttcacttgtatgagatatttctcctctcctgttttcacaaaccaagaaatccccaggtaggccaatcccagaggtgccatttagcagtatgcagcagcccagtttcagcataacaaaacatgccttggtagtggctctctcatgcaaataaaagaaagcttaagaaattcttgttgta

SEQ ID NO: 434 - DNA, 320 bp, Homosapiens
ttttttttttttttttttttttttttcagtattcataagtgtttaataaaaacaatctataacttaaaaattacaaatttatatagttagcccgttttgcatcactataaaggaataactgaggctgggtaatttataaagaaaaaaggtttgttttggcttacggttctgcaggccatactagcacggcaccaatatttgcctggcctttgatgaaggccccaggaaggttacaatcacaatggaaggcaaagggggagcagactcttttaagccaccagatctcacacgaactgagtgagaactcactcatcaccagt

SEQ ID NO: 435 - DNA, 108 bp, Homosapiens
  misc_feature: n=a,t,g or c
gatcanagaaggttggggtccagaaaggcatctgtgtgatggttccattgatgtgggatttccctacttgctgtattctcagtttctaataaaaagaaccaaatgaaa

SEQ ID NO: 436 - DNA, 346 bp, Homosapiens
  misc_feature: n=a,t,g or c
tttttttttttttttttttttttttttaacgttttcaaataatttattaggaatttaaaactgaaaataaaacctggaaaaagaagttacagatgtggagagaagagacaccggagatggtaacttgctggcttcgaaacaccatgtaacatcttaaaaaaaaaaaaaatcccaaagcaaatcagaaaacggaattccagggtcctgagcccatggttggnccagtggggtggaagggtccgggaatgagggagagggaagctaagtgtcncaggnctcagctcaaacgngtagaaaattaaaaataaaaaccaataaaatgcagcttctcttttattaggaanca

SEQ ID NO: 437 - DNA, 565 bp, Homosapiens
aaggagttgagtgatttattgagtgcttacttggtgccatggcatgtgctaggtgcttacctaaatcaactcattggatcctcacaacaaccctgtgaggtgggtttcataacccccactgtttaccgatgaggctcacagaggctatgtaacttgcccaagattctgcagctggtaaaggacggaatctgtgcctctgcactaccaatgcctgctcctgaaggaaggtttgtgagggtgaatttctcaaagtcacttcaggtccttactgtagcgacagtgttggcaccttctgtgtcctctctcaccttgcctgtgagccttccagtgggtgggaaaagaggcgtgcctatcagtggccattctgtgaacacagaagagagctgcgctggccacagagaagatagtccaatgatccttaaagttcaggcgtgtgggttggagccaaaggggcctgtccctggatataacttgagagtagtctggagaggaatttagaagataggatcctgagccggtgctgtgcccatgttagttctcccttcactcatgtaatcctcgtgcc

SEQ ID NO: 438 - DNA, 370 bp, Homosapiens
ttttttaggttttaaaatgcttcccacttttatttcctgtttgggagaagtctgtcgctgtggcaagttccgtcgtcttcccacagccctgtctgcagcggtagctcgtctccaatccggcatcttgcctttagctatcaattccatgatgtagccaaattcactcatctccccagactccgacatgtttacaccccttcacaaactctggaggaccgacgcgggtgtatcgaatttgtcctttcttttctctttttctgtttttagtctgagttttgccgagctccccgcccataagctgttaaccaggaaaagaggggaagcgccggggaaagcaagaagcgggcttgggtgaaatgaaggccatcga

SEQ ID NO: 439 - DNA, 342 bp, Homosapiens
tcaatttctgtgcaaactacttttatttataaggaaagtttctctattttgtttataaacattaaaccagagctgtgtgaaggcacttaattggggagaggtggggcagggatcctggtagagaccaatgtttcccacccagaccccaagactgctgggagagatggtgtcagcagtgactcccaggaatatccagtggtgtggtggcccatcccaggcccggctgggagtatggctggcttgctgggggatgtgatgatggtggtaggcatgggaggcactttggacgggatctgatttggcaaaaggaagtggtttcctgtccccagtgatttccagccc

SEQ ID NO: 440 - DNA, 501 bp, Homosapiens
ttttttttactcaaatgaccacatgccactctaatagagacaaatacttttgtgagttgatagaggtctttatgatgaaggcctgagatctacaaatagaaactagtataagcagagtgcaagtagaaagagaaggccccaggtctcatgcacttaaaaataattagcatttaacagttctgacgtacagattttcaccctaacatgattgtagcaaaatgatcacagaacttggaaaccagtgtggctggctataggcataggcaggatagggaccagtacttaagagctgtggggtcccagttctgggctttgacttctggcgtcaaagttaattgaacaatggtgtcaggattatatcttaattggaaatattgagtatgactgagttgaaatactgtcctcttcttttctatttggccatatgtcccagagctcttaaagcacaaaggtcccacatgtaagtaaggctgttccctacgtggctacatggagagtcta

SEQ ID NO: 441 - DNA, 1366 bp, Homosapiens
cgcagaactcagagctgctcttcctctgtggccagttggggaccagcatcatgaagtggatggtggtggtcttggtctgcctccagctcttggaggcagcagtggtcaaagtgcccctgaagaaatttaagtctatccgtgagaccatgaaggagaagggcttgctgggggagttcctgaggacccacaagtatgatcctgcttggaagtaccgctttggtgacctcagcgtgacctacgagcccatggcctacatggatgctgcctactttggtgagatcagcatcgggactccaccccagaacttcctggtcctttttgacaccggctcctccaacttgtgggtgccctctgtctactgccagagccaggcctgcaccagtcactcccgcttcaaccccagcgagtcgtccacctactccaccaatgggcagaccttctccctgcagtatggcagtggcagcctcaccggcttctttggctatgacaccctgactgtccagagcatccaggtccccaaccaggagttcggcttgagtgagaatgagcctggtaccaacttcgtctatgcgcagtttgatggcatcatgggcctggcctaccctgctctgtccgtggatgaggccaccacagctatgcagggcatggtgcaggagggcgccctcaccagccccgtcttcagcgtctacctcagcaaccagcagggctccagcgggggagcggttgtctttgggggtgtggatagcagcctgtacacggggcagatctactgggcgcctgtcacccaggaactctactggcagattggcattgaagagttcctcatcggcggccaggcctccggctggtgttctgagggttgccaggccatcgtggacacaggcacctctctgctaactgtgccccagcagtacatgagtgctcttctgcaggccacaggggcccaggaggatgagtatggacagtttctcgtgaactgtaacagcattcagaatctgcccagcttgaccttcatcatcaatggtgtggagttccctctgccaccttcctcctatatcctcagtaacaacggctactgcaccgtgggagtcgagcccacctacctgtcctcccagaacggccagcccctgtggatcctcggggatgtcttcctcaggtcctactattccgtctacgacttgggcaacaacagagtaggctttgccactgccgcctagacttgctgcctcgacacgtgggctcccctcttcctcttgaccctgcaccctcctagggcattgtatctgtctttccactctggattcagccttctttttctggactctggactttctctaataataaatagttcttctaaaaaaaaaaa

SEQ ID NO: 442 - DNA, 332 bp, Homosapiens
  misc_feature: n=a,t,g or c
gatcgagaatgtttgcaacgaccgnctggggaagaaggtccgcgttaaangcaacacggatgataccatcggannnccttaagaagctgattgcagcccaaactggtacccgttggaacaagattgtcctgaagaagtggtacacgattttaaaggaccacgtgtctctgggggactatgaaatccacgatgggatgaacctggagctttatnatcancnnnatgagaatcctcatcttcctgccccgctttcctctcccatcctcatcccccacactgggatagatgcttgtttgtaaaaagggaccttaataaagacttagatgttgaaa

SEQ ID NO: 443 - DNA, 376 bp, Homosapiens
  misc_feature: n=a,t,g or c
tttttattatcttgctttatatttaatggattagaactataaagattcttaactttgaaagcagaaatataagttggatagtagttgcagatctttaataccattttcaatttcatttatgagctgctacattataaatgagatgctctaaaataataatcgcttttgttgttgttgttataggaacaatgaaaattcctgttaggaacacaagttgctgtttatatttgcttgttctcttaaatngtatgagganggaaggtaaggtgggagctgttgggaaaagcccatcgtgggacctttgggaggattatcttcttgggttcaggtcatcnccaccacaggntttttaagggtgtggatttcctaggtctcc

SEQ ID NO: 444 - DNA, 291 bp, Homosapiens
tggaaaatcactcctttgtctttattaaagaaacttagaccagacctggcaatcaaggggtgaggtactggccaggaaggtggagtaggtttcaggccctggggatttcaagtgcagactgatggcctgggaggggccaaagagaccagatcctggcagcagctgaggaggtgcccaagggactgttcaggcactggggccatcagctggttctgtgggcaggggttgggggttgggatgcagggtagtttgggctggcctggaatctccctgaggccaccctgccttgtc

SEQ ID NO: 445 - DNA, 354 bp, Homosapiens
  misc_feature: n=a,t,g or c
ttttttttttttttttcaatagaaacactgtttattcaaatgacaggcaggaagcggtggagcagcaggggggaaagggaaccaggagggctgggagtgcttccctgtgtcccctgcaatcctgcttggcaaccacccgctgttggcatcagggtcagaaatactttccctcctctccctcctgccccaaactgaataaatagcatccctntccccacgagagctaggggagantcatgtgctgagtttggtgccccagtcacaagcccagagtcccggtgagggcagaagttcaaaatggcttttagggngtagaatacaaaantgttctactcattcncaccttcctcttcc

SEQ ID NO: 446 - DNA, 2461 bp, Homosapiens
  misc_feature: n=a,t,g or c
agccttcgctgccaggaccgtggtgaagcctctgggcttcctgaagcccttctccttgatgaaggcttccagccgcttcaaggcacaccaggatgccctgccacggctgcccgtgccccctctccagcagtccctggaccactacctgaaggcgctgcagcccatcgtgagtgaggaggagtgggcccacaccaagcagctggtggatgagtttcaggcctcaggaggtgtaggggagcgcctgcagaaggggctggggcgtcgggccaggaagacggagaactggctgtctgagtggtggctcaagaccgcctacctccagtaccgccagcctgtggtcatctactcgagcccaggcgtgatgctacccaagcaggacttcgtggacctgcagggtcagctccgatttgctgccaaactcattgagggtgtgttggatttcaaggtcatgattgacaacgagaccctgcccgtggagtacctggnggggaagccactgtgcatgaaccagtactatcagatcttgtcctcctgccgagtgccgggccccaagcaggacacagtcagcaacttcagcaagaccaagaagcctcccacgcacatcaccgtggtacacaactaccagttttttgagctggatgtgtaccacagtgacgggacacccctcactgcggatcagatctttgtgcagctggagaagatctggaactcatccctacagaccaacaaggagcctgtgggcatcctcacctccaaccaccgcaactcctgggccaaggcatacaacaccctcatcaaagacaaggtgaaccgggattccgtgcgctccatccagaagagcatcttcaccgtgtgcctagatgcaaccatgcccagggtctcagaagacgtgtaccgcagccacgtggcaggccagatgctgcatgggggcggcagcaggctcaacagcggcaaccgctggtttgacaagacgctgcagttcatcgtggcagaagatggctcctgtgggcttgtgtacgagcatgctgcagcngagggtttccctattgtcacccttctggactatgtcatcgagtacacgaagaaacccgagcttgtgcngtctcccatggtgcccctgcccatgcccaagaagctgcggttcaacatcacccccgagatcaagagcgacatcgagaaggccaagcagaacctcagcatcatgatccannacctggatatcaccgtgatggtgttccaccattttggaaaagacttccccaagtcggagaagctaagcccagatgccttcatccagatggctttgcagctggcctactacaggatctacggacaggcatgtgccacctatgaaagtncntccctgcgcatgtttcacctgggccgcaccgacaccatccgctcggcttccatggactcactcacctttgtcaaggccatggatgactccagcgtcacggagcaccagaaggtggagctgctgcggaaggccgtgcaggcccaccggggctacaccgaccgggccatccgcggggaggcctttggtcgacacctgctgggcctgaagctgcaggccatcgaggacctggtgagcacgcccgacatcttcatggacacctcctacgccatcgccatgcacttccacctctccaccagccaggtccctgccaagacagactgtgtcatgttcttcgggcccgtggtccccgacggctacggtgtctgctataaccccatggaggcccacatcaacttctccctgtcggcctacaacagctgcgcggagaccaacgccgcccgcctggcgcattacctggagaaggcgctcctggacatgcgtgccctgctgcagagccacccccgggccaagctctgagcccctaggactcaggcctgccaatgccacagccaagcccaccctgggatgggccacccaccagggctcagctccttggttccctcttccttggttccctcttccctggtcccccnnaaatgtactgagccacggaccgcatcctccagggacctgcaggccccagccaagtgccttccgtgggtcatcccagcacctgccagggcccgacctggggctgagtgcagaggctgagcaggacgttaggcccgggcccctggcacgtcctccaccggtgcctcctctgggaaagggaaccaccctccagagcaggagactggcaagagctctttgtctcaccagctcagccccggccactccctgccaactccatgaccaggccaccatctgtaccctgcttcccaaactcccaggcctggagacaggattgtctggggncgaggggccagggtgtgaggtttcacctccgttgcggctgtgctcctgtggataacattgctagcgagccgcctctggttccactcagcttggttcctgcccccgccctgctgtatgatattaatgtggaaggtcatcaataaaggg

SEQ ID NO: 447 - DNA, 463 bp, Homosapiens
tgctacaaaatgcatttatttccagtcagacaaaattcttgaactgtatattcgggtacatattataaggtcatctttgatatatgccctgtttacaagatccatttctaattattaaagtgaatatcaaacacacatctttgcatcttaaaacataaataaactgctaatgtttataagccacaaatctggtcactgacatgagtggcctgcaattcttcagtgatgagcacacggcgatacagacaagatcagattacccaggtaggcaggcagcaggcacctgtaattcacccgctgactgtgctgttgtggcagtgacccttcttgtgaaaaaagagttatgtgcagacaaaagtgtggacatatggcaacgtggagagggcattttcacagaatgcaaacaccatttcagggaaattagtagactccagaatggatgaaagcttcatggatgccaacc

SEQ ID NO: 448 - DNA, 253 bp, Homosapiens
  misc_feature: n=a,t,g or c
cgngcaaaagtgtttatttttctccttcagatatacantctattggggnttccgtgccactgaccaccatgtacaaggaagggnttcacaggcaagggggacaggtgagggcagcccccacttcactcaaggaacagggcaagggggcccagtacagagaacagaaatctcttacgacagcatcgtgccctggcagangattctgcatantcacctagaaatttcaattctaactgntttgatggaataatag

SEQ ID NO: 449 - DNA, 336 bp, Homosapiens
  misc_feature: n=a,t,g or c
ggtgacacatctccttttcacgtttatttcattttgttttaagatcacagaagagcagagcattcatacgtgtaaagtaacagaagagagaaacagaatttaaatacatttaaaaagaaaagaaaaaaagctttttttcattttaattttaattttttttttttaacacacattgcgctttttatctccttcacagagctagtacccagggaaaaaaatccacctaataaacaaaaatgaaaaaccttgaaaaacaaaaaatcccaaacaaaaaatggccatgtgtttgtatcttcaagggaggntcagtttcatgtctacagggctgaaaaaggg

SEQ ID NO: 450 - DNA, 533 bp, Homosapiens
  misc_feature: n=a,t,g or c
ttttttttttttttctcatcactgagtatttattatatataacaaatacatgggaaagaaaaaactatattgtgtgatataaatagtttatttacattacagaaaaaacatcaagacaatgtatactatttcaaatatatccatacataatcaaatatagctgtagtacatgttttcattggtgtagattaccacaaatgcaaggcaacatgtgtagatctcttgtcttattcttttgtctataatactgtattgtgtagtccaagctctcggtagtccagccactgtgaaacatgctccctttagattaacctcgtggacgctcttgttgtattgtctgaactgtagtgccctgtattttgcttctgtctgtgaattctgttgcttctggggcatttccttgtgatgcagaggaccaccacacagatgacagcaatctgaattgttccaatcacagctgcgattaagacatactgaaatcgtacaggaccgggaacaacgtatagancactgtagtcctttttttcacagtg

SEQ ID NO: 451 - DNA, 425 bp, Homosapiens
ataaagatttcctccaagccacatgaggactctggcacccacccacaaagcaagacctgtatttataagccgagggtcagggagctaactgcgggacccgtcagccccgtgtacccatccccgtccccacccccccctccaccgctgggcccatcagtgtgtgttggggggatgcttgcagctgggggtgaggagacaacaaacctcgggaactggagccagagctgcggcctgactgacgccttttgatgctcacgggaaatttctgcccaggatctcagccccaggctggttgtttctacaaatctctctcaaatgtattattttggtgacaaaaatgaaggagctttgtaaatttttttaaaattatgaatcatatcaagtagttgtttacatttcttgaaaaaataggaactcgggcagca

SEQ ID NO: 452 - DNA, 415 bp, Homosapiens
ttttagttaaaaatgaactcgatatgtttaataaagcttggtattaccaaaatcgcggtacaaacatcaagtcacacgcccacacgacagaattccatttacaaaatgttcctcgggaagcctccaccgaacccgtgcccaaagagagcccgaaccaagcctggggtctctgggtgggcagaaaacgtgagtgcgggggttgggggaactcgggggagggggaggagggcagggaggagggcaagtggagagaaacgcagactcaaaagcagtccatataacagctcaaaaagagccagccggggatattatcacaatgatacagtacaaatcaaagcaaaaatcaaaatcattcggctgataacagcaggctacgctgccaagaacccagatggcagccttcttgcggccatcc

SEQ ID NO: 453 - DNA, 3150 bp, Homosapiens
ttcaacctggacgtggaaaagctcgcagtgtacagcggccccaagggcagctacttcggctacgccgtggacttccacatacccgacgcccgcacagcgagtgtcttggtgggggcgcccaaagccaacaccagccagcccgatatcgtggaagggggagccgtctattactgtccttggcccgcggaggggtctgcgcagtgcaggcagataccgtttgacaccaccaacaacagaaagatcagagttaatggaaccaaagaacctatcgagttcaaatccaatcagtggtttggagcaacagtgaaagctcacaaaggaaaagttgtggcctgtgctcctttatatcactggagaactcttaaaccgacaccagaaaaaggaccagttggcacctgctatgtagcaattcagaacttcagcgcttatgccgagttctctccttgcggaaacagcaatgctgatccggaaggccagggttactgccaagcaggatttagtctggatttttataagaatggagaccttattgtgggaggacctgggagtttctactggcaaggacaagtgatcactgccagtgttgcagatatcattgcaaattactcattcaaggatatcctcaggaaactggcaggagaaaagcagacggaagtggctccagcttcctatgatgacagttaccttggatactcagttgctgctggggagtttactggggattctcagcaagaattggttgctggaattccaagaggagcacagaattttggatatgtttccatcattaactcctacgatatgacgtttattcagaatttcacgggagaacagatggcatcttattttggatataccgttgtcgtatcagatgttaacagtgatggactggatgatgtcctggttggggcacctctctttatggaacgtgaatttgagagcaaccccagagaagtagggcaaatctacctgtatttgcaagtgagctctctcctcttcagagacccccagatcctcactggcaccgagacgtttgggagattcggtagtgctatggcacacttaggagacctgaaccaagatggctacaatgacattgccatcggagtgccttttgcaggcaaggatcaaagaggcaaagtgctcatttataatgggaacaaagatggcttaaacaccaagccttcccaagttctgcaaggagtgtgggcctcacatgctgtcccttccggatttggctttactttaagaggagattcagacatagacaagaatgattacccagatttgattgtgggtgcatttggaacaggaaaagtcgctgtttacagagcaagaccggttgtgactgtagatgcccagcttctgctgcacccaatgattatcaatcttgaaaataaaacttgccaggttccagactctatgacatctgctgcctgcttttctttaagagtatgtgcatctgtcacaggccagagcattgcaaacacaatagtcttgatggcagaggtgcaattagattccctgaaacagaaaggagctattaaacggacgctcttccttgataaccatcaggctcatcgcgtcttccctcttgtgataaaaaggcagaaatcccaccagtgccaggatttcatcgtttaccttcgagatgaaactgaattccgagataaattatctccaatcaacattagtttgaattacagtttggacgaatccacctttaaagaaggcctggaagtgaaaccaatattgaactactacagagaaaacattgttagtgaacaggctcacattctggtggactgtggagaagacaatctgtgtgttcctgacttgaagctgtcggctagaccagataagcatcaggtaatcattggagatgaaaatcaccttatgctcataataaatgcaagaaatgaaggggaaggagcatatgaagctgaactctttgtaatgataccagaagaggcagattatgttggaatcgaacgcaacaacaagggatttcgaccactgagctgtgagtacaagatggaaaatgtaaccaggatggtggtgtgtgaccttgggaaccctatggtgtctggaacaaattattccctgggcctccgatttgcagttccacgtcttgagaaaacaaacatgagcattaacttcgatctccaaatcagaagttccaacaaggacaatccagacagcaattttgtgagcctgcaaatcaacatcactgctgtagcgcaggtggaaataagaggagtgtcacaccctccgcagattgttctgcccattcataactgggaaccagaagaggagccccacaaagaggaggaggttggaccattggtggaacatatttatgagctgcacaatattggaccaagtaccatcagtgacaccatcctggaggtgggctggcctttctctgcccgggatgaatttcttctctatattttccatattcaaactctgggacctctgcagtgccaaccaaatcctaatatcaatccacaggatataaagcctgctgcctccccagaggacacccctgagctcagcgcctttttgcgaaactctactattcctcatcttgtcaggaagagggatgtacatgtggtcgaattccacagacagagccctgcaaaaatactgaattgtacaaatatcgagtgtttacaaatctcctgtgcagtgggacgactcgaaggaggagaaagcgcagtcctgaaagtcaggtcacgattatgggcccacaccttcctccagagaaaaaatgatccctatgctcttgcatccctggtgtcctttgaagttaagaagatgccttatacagatcagccagcaaaactcccagaaggaagcatagcaattaagacatcagttatttgggcaactccgaatgtttccttctcaatcccattatgggtaataatactagcaatacttcttggattgttggttctcgccattttaaccttagctttatggaagtgtggattctttgacagagccagacctcctcaggaggacatgaccgacagggaacagctgacaaatgacaagacccctgaggcatgacaagaaaaaaaaaagaagaccaaagacctgaaacactggtcctgttcaaagaaaaagaaagaacatgaggcc

SEQ ID NO: 454 - DNA, 438 bp, Homosapiens
  misc_feature: n=a,t,g or c
ctgagtaacaacctttgatcgatttattaattagaagctatttataccagtagaaaaatacccacaaacaattaaaattataagactatttttaaattcataaaaatggtactgtactgggtgtgactacatttccagtttttggtgtctcatgtgatacagaatcaggaggacttacatggctggnggggaggggagctgttttcctaatttgttactatttaaaaatgggttaagggtgggccacatcttggggggcttctcctttaatgtaaagtcccttttgggaatatcacttaaaatctggggacagggtcaaatcagctggctactctacacggcccgtgtctggcagtacagggcgtgggtgaggaagnccctntaccctcacttcgggcagngtcttnacccttggctgnttcgcagcaacggatccgg

SEQ ID NO: 455 - DNA, 2872 bp, Homosapiens
tccaggaatcgatagtgcattcgtgcgcgcggccgcccgtcgcttcgcacagggctggatggttgtattgggcagggtggctccaggatgttaggaactgtgaagatggaagggcatgaaaccagcgactggaacagctactacgcagacacgcaggaggcctactcctcggtcccggtcagcaacatgaactcaggcctgggctccatgaactccatgaacacctacatgaccatgaacaccatgactacgagcggcaacatgaccccggcgtccttcaacatgtcctatgccaacccggccttaggggccggcctgagtcccggcgcagtagccggcatgccggggggctcggcgggcgccatgaacagcatgactgcggccggcgtgacggccatgggtacggcgctgagcccgagcggcatgggcgccatgggtgcgcagcaggcggcctccatgatgaatggcctgggcccctacgcggccgccatgaacccgtgcatgagccccatggcgtacgcgccgtccaacctgggccgcagccgcgcgggcggcggcggcgacgccaagacgttcaagcgcagttacccgcacgccaagccgccctactcgtacatctcgctcatcaccatggccatccagcgggcgcccagcaagatgctcacgctgagcgagatctaccagtggatcatggacctcttcccctattaccggcagaaccagcagcgctggcagaactccatccgccactcgctgtccttcaatgactgcttcgtcaaggtggcacgctccccggacaagccgggcaagggctcctactggacgctgcacccggactccggcaacatgttcgagaacggctgctacttgcgccgccagaagcgcttcaagtgcgagaagcagccgggggccggcggcgggggcgggagcggaagcgggggcagcggcgccaagggcggccctgagagccgcaaggacccctctggcgcctctaaccccagcgccgactcgcccctccatcggggtgtgcacgggaagaccggccagctagagggcgcgccggccccgggcccggccgccagcccccagactctggaccacagtggggcgacggcgacagggggcgcctcggagttgaagactccagcctcctcaactgcgccccccataagctccgggcccggggcgctggcctctgtgcccgcctctcacccggcacacggcttggcaccccacgagtcccagctgcacctgaaaggggacccccactactccttcaaccacccgttctccatcaacaacctcatgtcctcctcggagcagcagcataagctggacttcaaggcatacgaacaggcactgcaatactcgccttacggctctacgttgcccgccagcctgcctctaggcagcgcctcggtgaccaccaggagccccatcgagccctcagccctggagccggcgtactaccaaggtgtgtattccagacccgtcctaaacacttcctagctcccgggactggggggtttgtctggcatagccatgctggtagcaagagagaaaaaatcaacagcaaacaaaaccacacaaaccaaaccgtcaacagcataataaaatccaacaactatttttatttcatttttcatgcacaaccttgcccccagtgcaaaagactgttactttattattgtattcaaaattcattgtgtatattactacaaagacggccccaaaccaatttttttcctgcgaagtttaatgatccacaagtgtatatatgaaattctcctccttccttgcccccctctctttcttccctcttggccctccagacattctagtttgtggagggttatttaaaaaacaaaaaggaagatggtcaagtttgtaaaatatttgtttgtgcttttcccccctccttacctgaccccctacgagtttacaggcttgtggcaatactcttaaccataagaattgaaatggtgaagaaacaagtatacactagaggctcttaaaagtattgaaaagacaatactgctgttatatagcaagacataaacagattataaacatcagagccatttgcttctcagtttacatttctgatacatgcagatagcagatgtctttaaatgaaatacatgtatattgtgtatggacttaattatgcacatgctcagatgtgtagacatcctccgtatatttacataacatatagaggtaatagataggtgatatacgtgatacgttctcaagagttgcttgaccgaaagttacaaggaccccaacccctttgctctctacccacagatggccctgggaacaatcctcaggaattgccctcaagaactcgcttctttgctttgagagtgccatggtcatgtcattctgaggtacataacacataaattagtttctatgagtgtataccatttaaagattttttcagtaaagggaatattacatgttgggaggaggagataagttatagggagctggatttcaaacggtggtccaagattcaaaaatcctattgatagtggccattttaatcattgccatcgtgtgcttgtttcatccagtgttatgcactttccacagttggtgttagtatagccagagggtttcattattatttctctttgctttctcaatgttaatttattgcatggtttattctttttctttacagctgaaattgctttaaatgatggttaaaattacaaattaaattgggaatttttatcaatgtgattgtaattaaaaatattttgatttaaataacaaaaataataccagattttaagccgcggaaaatgttcttgatcatttgcagttaaggactttaaataaatcaaatgttaacaaaaaa

SEQ ID NO: 456 - DNA, 370 bp, Homosapiens
tttggtaaagacttttaagagaaagaagtattttaaaaagtagcagtgctctgaggctcagggtgtaggatcgggggcacagcctggtcccgggaggccccttgtgcacaggtggtggcccagggcaacgatgctcgctcttgggggacgcgcggccgggggacgcgccatgtgtccggcccggggctcccggcgggctccggcggcagggacaatggcgaggccgctcaccacttgaggaagaccatcccggccaggacggtgtagcccagcaccaggaagaggaccttgagcagacggtcactcttctcctccagctccttggccaggatctccaggaaggtgatgaagaggaaggtgccgcccgcca

SEQ ID NO: 457 - DNA, 204 bp, Homosapiens
  misc_feature: n=a,t,g or c
cncgtttccccgactttattcagtggcacgtncacagcggggatgggggtagacacaaggtggggcctgacctgtcctggagccctgggggcaccacacaccatgcactatggatggaagggggcacaggaggggcttggtggccccacagaagcctgtntaccaggnaggaggcggtgagtncctggttccccctagcccagg

SEQ ID NO: 458 - DNA, 1206 bp, Homosapiens
gttgctgtcggggagttgaaacctaattttgtggcgtagagctatgcagcttgaaatccaagtagcactaaattttattatttcgtatttgtacaataagcttcccaggagacgtgtcaacatttttggtgaagaacttgaaagacttcttaagaagaaatatgaagggcactggtatcctgaaaagccatacaaaggatcggggtttagatgtatacacataggggagaaagtggacccagtgattgaacaagcatccaaagagagtggtttggacattgatgatgttcgtggcaatctgccacaggatcttagtgtttggatcgacccatttgaggtttcttaccaaattggtgaaaagggaccagtgaaggtgctttacgtggatgataataatgaaaatggatgtgagttggataaggagatcaaaaacagctttaacccagaggcccaggtttttatgcccataagtgacccagcctcatcagtgtccagctctccatcgcctccttttggtcactctgctgctgtaagccctaccttcatgccccggtccactcagcctttaacctttaccactgccacttttgctgccaccaagttcggctctaccaaaatgaagaatagtggccgtagcaacaaggttgcacgtacttctcccatcaacctcggcttgaatgtgaatgacctcttgaagcagaaagccatctcttcctcaatgcactctctgtatgggcttggcttgggtagccagcagcagccacagcaacagcagcagccagcccagccgccaccgccaccaccaccaccacagcagcaacaacagcagaaaacctctgctctttctcctaatgccaaggaatttatttttcctaatatgcagggtcaaggtagtagtaccaatggaatgttcccaggtgacagcccccttaacctcagtcctctccagtacagtaatgcctttgatgtgtttgcagcctatggaggcctcaatgagaagtcttttgtagatggcttgaattttagcttaaataacatgcagtattctaaccagcaattccagcctgttatggctaactaaaaaaaagaaaatgtatcgtacaagttaaaatgcacgggcccaagggggattttttttttcacctccttgagaatttttttttttttaagcttatagtaaggatacattcaagcttgggttaaaaa

SEQ ID NO: 459 - DNA, 384 bp, Homosapiens
ttttttattccaatgaataataatcacactttaatataataacaaacatacaatacattaaagttagaacactactttgataagacaatcatactcaagctaagatacaaggtacagacatactgaaattgtaaagtgaccattttaatgtttgatatttacttctcttattggcacaagactaataagatagatgggttgtattactcttaaaatctaagacttctcctctagctcagggaaaatactggtggaaacctgttttacccaaaagcagctttaatatctgtttaaccaggttattctataataagaactccattttaatgcacgttatccattacaaatgtgtgagatattctataaaacacatatttaaaggtc

SEQ ID NO: 460 - DNA, 220 bp, Homosapiens
acggtgggatacgttttattgagaagtgtcatgacgaaggatatctagatcagggaagtctatcaggacagggtgaaagaaggcagtctgcctggcgagctgctcagcccccttccccatcagcctagcccctctttgaaccgtgccagttctagacggcctacaggagcgcgaatgagtgaggaacttggcacagagcacctttctgtagtaatcccca

SEQ ID NO: 461 - DNA, 326 bp, Homosapiens
  misc_feature: n=a,t,g or c
gaggnggaaggcatttatttgctttgncttgctaacccncaaaatcaaagcctgtcccagcctgacagcttccagcagaaagtgtcaganccagaggcccagccaaggcccaggcaggnaggcggtcctcctgggccctggcattgttcttacacatggagggcatggccatcttctctttcagggacaggctggcctgacatggaaggtgaaacaaggcagcagcccctgcctccaggngaactntgcagantgcagtgccggggagctgaggggtcctgggaaggagctatggagtcccntccagcaggttacagccacatcct

SEQ ID NO: 462 - DNA, 2964 bp, Homosapiens
ctcgaggaccgccgccatgtagacgggcgcgccggcccccacccgctccgcgtagttgcctttgcgcagcaagcggtgcactcgccctaccgggaactggaggccagcgcgggacgagcgcgacttggccttggcgcgggccttgcctccttgtttgccacgaccagacatgactgaaatcaaggttaaacacagacaacgctcagaacctcgcaacaaaataagattgaaagagaaccaagaggaaagcctttataagctttcctaggggtggggtcaagaacgagtttttcattggtcctaatatggcttcagaaccggccaatcaagtcaagagtcggtgttgttacgtacgcattgctgaaaacgcaaggtccgcacaccgaatggaaatgaacgactttcggagccctaatttgcataaggtggttataaaagaatcaggccgccattctcttacttcttttcttggctaagccgcgtttgtactgtgtcttaccatgcctgaaccggcaaaatccgctccggcgcctaaaaagggctccaagaaagccgtcaccaaagcccagaagaaagacggcaagaagcgcaagcgcagccgcaaagagagctactccatctacgtgtacaaggtgctgaagcaggtccaccccgacaccggcatctcgtccaaggccatgggcatcatgaactccttcgtcaacgacatcttcgagcgcatcgcgggagaggcttcccgcctggcgcactacaacaagcgctccaccatcacatcccgcgagatccagacggccgtgcgcctgctgctgcccggcgagctggccaagcacgccgtgtccgagggcaccaaggcggtcaccaagtacaccagctccaagtgagtccctgccgggcactggcgctcgctcgctcgagtcgccggctgcttgactccaaaggctcttttcagagccacccacctaatcactagaaaagagcttgttcacttattcccttagtttcttttcataaagtaagttattttagtgtgaaggtcatgggaaatggcatacgtagctttttaactatttggaactcgaggtccccagtgcgtcattggatttgcttttgaatctagagcgtgtctttactcattgtgctgcttagccttcccaggagtcggttctcaattaggctgttgggaatccgcctctttacccgcccccactcccgccccacacgcgccctggtggctccttgggtttgtttcattctaaaacgaagtggctgagttcggctgtcatttaagagaactccaggacacaattcagcccgggttccgcaaacactgcgtgacagctctgtatgactgacgcttggcagcagcttttgtgtccggtcaccagttctgccgtgcgatggggcctcctgtggataccagccgttctgtgtattttggacgaaggcggcagccgggtcccagccttgtcctgattgggcgacaagaatattcaaaattctgcgcctttttctaatttgtagatttcagtttccgtcgttcactttgagactttgaaattcctatttctcattttgttgataatttctgcatttaatggtctgtgctttaaatggtaacgctacggccccaggtcactgcgaggcacttaccatgtagatacgggctcaaaagtcacctctcagagacctacgtcatccactcaggaattcgcgcctctcatacttgcctgtctcattttatcttccttctagcagctgtctgaaattggttcgtctgttttcttgtttatggtattctcaagcccttgacagaccggctagtgtggttttcccgtgcatcttcagcctggcacattatggacacttaaatactacgtattgatctaatattgttgggttaatttttccatcccacccttttcttaatcgcttccgtggatggatgaagggtgctgttcatttccattagatgtatgtgaaggcacagtgaaaatggaaatgttcttggagctacttcctcaaaatgtatccttagtcacctcagtgcaacagctgggagggggccgtgttaagattttttttgctacaaagaggaggtggcaatggtagatccacccttatgcttgctcagtttagcataacctcttatggattttcatcaaattcagcgtgttggtcactggaaagagccttttccttctccttttcttactctcccctcatggtgttcccctcttaaaggaggaggagcttttaatttacacttaccacctcatttgcttttctggaggccatgcaatataggcgggactacagagttaatctcctttttacaaatgaggccaagagaagcctcattggttcacagtcatgcagctcatactgtccacccttgtattctcagatgcaggacaattgcattttagttttattttgtggaggtgcagaatatttactctttctgtccaacccttgattctgccgaggaagacactgatggtttgatgagtgattcagctgtttttggctaagggcttttggagctgatggcaggggtttgatgaatccaaatgagctctagacattatcacagactgaatagatcttaactgtctcctacatgtgtgttttcaaatgtgtatagatgctattgttattaataaagttaccaattaatttaaaggctttgctggattcttttatctacagtgtattttctcaatgaatgaaattaacagatacaacttccactgtgtctgtagaaaagcgtgggtgcctctgatctgggggatgactatttataagccaccagccaaactgctgccccaaaggtgcactggggctgaaatagtctgttacaaggccactgttaatgcttagtaattgaaaatatatgatcacaatagacagcagtacaatagatggagaataagttcatataagatcgtaacaccactagagcac

SEQ ID NO: 463 - DNA, 394 bp, Homosapiens
  misc_feature: n=a,t,g or c
gattatttaacatcgtttaataaaaaagtagtagtgcaaacaggaaagtagcataaaaatatagtgttgtngtggnnngctggtgcttgctgctgagaagctgaagccagannnggccaggtgtgaggnaggaggattctttaaaggcaagaagagagaggcctgcctttaagagccaagagagccgctcatccatgaccccaacacagagctctgtagaactgctgtcacaccccaaacaccaacataagggggtgagagaatgaactccagccgcttctcccaacacaacccaacagagctattctgggacatngtgtgtttncgagcttgtgtgttggagagcaccaaaaagctcattcagctngccccaggccttcngtgcnggtctcgg

SEQ ID NO: 464 - DNA, 3768 bp, Homosapiens
cctctgacccttttggtcgctaggagtcagccgactcagtacacaggactcactgaatggagacacaaggctcctccagggagtggcggctcatggcaatcctagaatggtcaccagccaggctttagagacccacacagagggcgttctgacccaaagttgcactggggaactccaagtttggggattctttgaatttaactctttttctagctacatttcctattatttgtccaattcttaccaaacatctctgttcacattctgaagctgggatctgactggcagagctagtagatgctgactattcagatggagccctgacattggctttctcagcttggctgtgactggcagcaggtttgcgggagaactgtgtgtcccagaacatgactggctacacctgcacctcagcaagattggggcagggcagttatcttcaaaaagctgtgtaggtggggcagtcattactgacaaatccagtgcagacccaggatggcccaaacactggcttatcctttctgaatctcatctcccacagctgtaaagcggggtggtgctcgctacctcacagaggtgttgtaaagattagatgtaatcttgccaagcagccactttgtaaactgtatagtcttatgcagatggaaggaagggcctgtgcctaccttgatcatagcactaaacaaactgtactgtattttcattcctcttagttatctccctaaaaagactctgagttccttgaacacaggaaggtgttttatttgattttgttatcctcagcatgtagcagtgtctgacacacagtaggtgctctatcactgtgagagggatggatggatgggtggagttacagatggatagaaggatagatggagggatgggtggatgatggatggatagatggatggaggggggatgatgaatggagggataatgagtggatgaatgagggaatgggtggatggatggatggagggatggaggaacagatagatagatggagggatgggtgggtgatggatggatagatggatggagggagggatgatgaatggagggataatgaatggatgaatgaggggatgggtggatggatgaatggagggatgatgggtggatgaatgaattgagggatggatggatgaacacatggatggatggatagatggatagatggaggaactggtggattttggatggatgggtggatggatagatgaatgaatgcctggatagacaaagagatgatggatagatgaatagatgaattaagggatgtcggatagatggagggattgatagatgttggatggatgggtggtggatggatagatgagtgaatgcatggatagacaaagagatgatggatggatgaattaagggatgacagatggatggatggatgagtaactggatggacaagtggataaatggatagatggttgaatacctgaatggattgaaggaggatgcatggatgtaagataaggctaatcatcctccactctctttctttgcaaaaccatccacccatttactcaataaacatttattcagttcaaacttggcacaaagcaccatgtgaggcccaagagatacgtgggttaataaaacagagctcctgccctcctgaaaactgcaaagaaaggggcgtggcttcctgagttcaaatcccaactctgccagcgactagctgtacatcagtgatgtttccctactttctctcaattaaatagggataatgtcagtacctatcacattgggaggtcttgcggggattaaatgagttaccaaatgccaagtgtttgggacagggcctggcacccagcaaagtctcttgtgagtgctggctgctattatcctaatggagaagatggcatgaaaaccaggaaataggatgccctttgggaagcaatgcaacaggaacttacacaaagaaaggaaaggaggaagcaattagtggtgtctcaaaggagtatgtcaagaaaaacttttcagagggaaacctttgagcagggccatgaaaacaggagttctctaagagattgtggacttgcctgggaccacctggctataagcacaaaaccatccggttcctttctgtcacttctggcgggtgaggggtctctggcaaaggggcagaaggtgcgtgagaggttgcgaatggcaggactgtcctggccagccggggcacctggtggccaagcttagaaacatgacaggtcctcttgggagggctgaccgcagggagcgttgggtttcaggctgctggcgtcggcttctgtggtgccctttctgtcggctatgagagtccagacagtgcccaacctcctccccttctttccacacgcacaaccaccccaccccctgtggcctgagctgtcctgcctcgccacaatggcacctgccctaaaatagcttcccatgtgagggctagagaaaggaaaagattagaccctccctggatgagagagagaaagtgaaggagggcaggggagggggacagcgagccattgagcgatctttgtcaagcatcccagaaggtataaaaacgcccttgggaccaggcagcctcaaaccccagctgttggggccaggacacccagtgagcccatacttgctctttttgtcttcttcagactgcgccatggggctcagcgacggggaatggcagttggtgctgaacgtctgggggaaggtggaggctgacatcccaggccatgggcaggaagtcctcatcaggtaaaaggaagagattccattgcccctgccacccacaccctaagatcaagggtgttcagctgcaaggtggaaagtttgcacgtggggtaggtcagttggctgcattagttaagggtgttagaacggtcacttgctttttctttgcttttaagtgtcagggattggactcaggagagggaaaggagccatttcaggctgatatcagcagctggaggaagcatgagaatcaaacctaggatgctcagagtccaccaggaagaattttagaattatagacagtcagagttaacaagggtcctgagagattttgtacagccacctctcttacaggatgaggacaaaaagcgactgagaaggggaggacatttccagagtcacagctcattaaatgctcttaaagtgtcaaggttaagacatgctcttcaaggggagacagatctggttctagacttggctctgccactgagccactgggtgacctttgggaaggtactcaacctctcggagcctcaatttcctctcctgtacagtgaggggatatcctaatatctatatcctagaggagatgtgagaattaaataaaataatgcatgcaagaggcctggcatggttcctggcatatactgagtcctagaaatgttagtagctattactgatgaagcccaggctagggacctttcaaagcattgcaattagagaacagaagatagaggctcattagtgaccttcgatgttgagtatgtctctagtttgagaggtctgaatgatgtggtctgcaagtatatcctgccttctaccacaagggattccagaatacaccaaagaaaacaaaattctgaggtttgtaaatagagggtggctgtggtttgtacatagaagctcatctcctcgttgccttctatcccaaaggtgatacactcttctcttggccccttccctcaccattctgagctggttccctcagaagtctaataggttaagaatcaacgtttctgccaacgggaggaaggaagtgggcgccgg

SEQ ID NO: 465 - DNA, 274 bp, Homosapiens
ttttttttgaaaaatatttatgtggagtttttaatccatattagaattcagttgttgtaacttgaccataaatttaaacagaaaccatcttctgagacatacattctaataaatgtatcaacagtactgatagtcaacgaagggtcaatttaaacttattagtaacatttcatttttctatccaacagaaatctatagtggtttgcccattacatatctgaaacattgtcttatgaaaacaaaatgaaacaaaattaaataaatgaagataaaa

SEQ ID NO: 466 - DNA, 419 bp, Homosapiens
ttttaagtttcaacctttttattcaaagcagcttctcacaatgtataaatactgcatattagcacacatgaaaaatacaacttctaaggcacccagaaatgtgttcatacacgttacaggaccattcacaaagagagtgtacaatttgctctagacagtcaggatttgataaatcagaagattattatccctcagtactgcacccagtctcagtaaatatttacaacatggtgagaaggggtcagctgtaccttctttataattctatgaagtactcagacttacaaatattcagaactagttaaagactctcccatggataatctgggcaaaataaaacaagtagcctaattttggcaaagggtctcgggtgggattttgggtggtatgcttacatccatgattcaaatcccaaacac

SEQ ID NO: 467 - DNA, 318 bp, Homosapiens
  misc_feature: n=a,t,g or c
ttttgaacacgtatgtgtctgtttatttcaaggtgtggaacacagacacatccccagatggggnaggaggggagacaaggacacgggtacaaaaactggaaacaaagccacccgctacagctcagacggcaccgccacgatgtggtttaaggctctgtacgtatatatatgtgtagaggctcacacacgcgcacacgcacacgcagaggcgcactgacacggggactgaggccagacgtgaaggctgactgcagctcgcagcccacctaaaatattgcaattatgtttattaaaaaagtgtaaaatgggaagactgtg

SEQ ID NO: 468 - DNA, 265 bp, Homosapiens
gttttttaacattttaatttcaacgtgccagcatttgtccaaatgagatgatacaggctagaatgcacggcggaattccagactggactcactccataagccaactcatcactgcccgtgaacatgaattctggtcctcagagaagctgacattgtttccctgaacattcccgtggtctccctctgaaagccgatgaccatccaaccctgactcacctgaaatatcctacgagcatcgccctccgagactgacgattattaacca

SEQ ID NO: 469 - DNA, 350 bp, Homosapiens
ttaactgacaatctgttttggttttttttttattgcaaattgttttatgactataactcagccatttgtgtgtggaatacacatgcgtaggggaagactatgaaactcacttgttactcaaacacacttgtttataaatacatatatacacacacacatatacatatccacacccaacttttttttttcccaaaattcaagtcaacaatttagtggcagagagatgctataaaaacattatttttagatgccacacaagtcatgagaaccattaattttatcatacaactgaagtacagccatcttgaattctacctggattaaagttgatcattttgttaccaatgcaa

SEQ ID NO: 470 - DNA, 469 bp, Homosapiens
  misc_feature: n=a,t,g or c
anaattcaaacttttatttggcaataagttcagagtcacataacacataaaatcaacatttaaaataaatagcaaattcacatctagaataaataggtctgcctaatttgcattaattgtgcctgatatcatacaggcacaatctgtcattccacgagataactggaaaagtctccaaagtcagagttcaaacctgcaggactgaaaacacacagaagcactgtcgcaggttgggttccccgaaagcagatactgaggtggagaatggcgtgcaggaaggttcataggacagtgctgtgggctgagccggctgggtacaggcttgtcagggagaggcactgggctgtaatgtggccacaatgaggtctcactggaccccacaaggggctctggagctgggatggccccagaggttttcccaagttggggtgaggaggccagacctttgtaccccatatggagccggtaa

SEQ ID NO: 471 - DNA, 454 bp, Homosapiens
  misc_feature: n=a,t,g or c
ttttttttttttttttccctttcttcatgcatttattaagatgaaatttacataacgaaccatcttaaagtgaacagttcagtggcatcgagtgcatttgcaatgttgtagaaccacgactttagttccaaaacatttccncccccannaagataaaactccgtacccattaaacagtttcttcctatgccttcaccctgangcccccggcaggctataaatatacattttatttttatagggtttacctcttctgggatatttcatatagggngggaatcataaaatgtgtggaccttttatgtctggggttctttacactgnggcataaatgcttccggggggttcatttcacatggcggcatatggtggaggtgctggtatttccncttttcnggggctgaggtaggtaggtccctttgtttggggtgggggcttaccatttggttnttgg

SEQ ID NO: 472 - DNA, 323 bp, Homosapiens
ttaacagttaaacttttatatttacaatattctcttcatcttttgccaggtttaaaaatgtgtacagagccgcaaagggttggggtagggataagggattgtcgggattgttttggggagaggagctgggcattggagtccgtggctgaatcatggggtcccccagcccccctcccatgccccaattctgagggcatctgtctacagggttcagggcccaggtctctagcatttggagggcatggctgtttggagaggagctagaccaggcaggggaaaggatcagaaaataactaattttccatggatggaggtaggaagag

SEQ ID NO: 473 - DNA, 380 bp, Homosapiens
gaaccaatcaatcactggagacacacagactccacctgtatcaaacgaggataccagccacccagacagccccagtcccagctccatccatcctgcaatccctcctccacagcacagcacagcccagacgctgcctctgggaaggaagcctgaggcagagttgctgagcctctgggaaaatctggaaatttggtttccccaagatagactccacctcctctggaaagatgctgtgctcctgacagggctttgtctccctgggaaggaatccatgtcttgggaaggctctgaatcccaggaaaggttccacacctgcaggagggactccttggtcctgaagggactctgtggcctgcataggttccagtccttaagaagga

SEQ ID NO: 474 - DNA, 546 bp, Homosapiens
cttttatgcagagtttgattatgctttatttttaaaaatcacattcttccccattcccagccaacgaacaacactattcattctgaaataagaaaatgaaagaattttgagaagtcacacaacattgctgtaaatttcattttttttttttttactaataaaacagatgcttctttctcagagatgggttttcactttcaacatgcgtcatagcatctgattttctgagccatcttgggaaatggagtctttcctaatgtcattgaatgtggtcaaagctatctacaaagcagagacagtaggctcttggtgaatcagtttgggaaattcacaattaagcagtctcagggagtgaaattccggggtctgatgagactgtggaaaccatgtggtactgtagggagagcacaggtttggatgccagacaaatatctaaatctaaccctaatccactgcttataagcttagtgattgttgcacaagttgtttagcttctctgagcttagatacctcactgtaaaatgggaataatacctctttttagtg

SEQ ID NO: 475 - DNA, 5260 bp, Homosapiens
tggaaacagaggagcaagcctgttgtaatcgctacgcccacttggtggcctataaaggaagcgggcgaaccccggcagccctacacaacttggggcccctctcctctccagcccttctcctgtgtgcctgcctcctgccgccgccaccatgaccacctccatccgccagttcacctcctccagctccatcaagggctcctccggcctggggggcggctcgtcccgcacctcctgccggctgtctggcggcctgggtgccggctcctgcaggctgggatctgctggcggcctgggcagcaccctcgggggtagcagctactccagctgctacagctttggctctggtggtggctatggcagcagctttgggggtgttgatgggctgctggctggaggtgagaaggccaccatgcagaacctcaatgaccgcctggcctcctacctggacaaggtgcgtgccctggaggaggccaacactgagctggaggtgaagatccgtgactggtaccagaggcaggccccggggcccgcccgtgactacagccagtactacaggacaattgaggagctgcagaacaaggtagggcctgctggtgggaggggtctccggggggcatgacttcttccccccaactcctgccttggccaaaggcctggagtccagccatagggtctcagggagccaagggtggtttggctgtggcttagcttctgggaacctgccttggggcccctgtgtggctcacatcccccttttctggggacagcaagctgagtcaggaacaaagaggccttgtggagccccttggagcctcagtttctccctcgtggagctccgccacctggagaggttgtaggatgaggcaggaggatgcagatggagggctgggcccgtgggctgctggatgtgtggtgtcttgctcctttggagcaggggtcaacaggagggggttttgggtgatgtggagtgggggtgtctgagtgagctcctgatagcacctgctgcaggaggaggcagaaaggagggggcgggacctcagtgtggggaaggcctctgatgtgccttatttggggatttttctggcttctcctttcctcctgctgtcccttaagacgggctcagcaaaccccagggggcggggctgctggctggcgcccagggttagggattaggaggggtcctgacttttgatttggaaccactctttaatgagggctcctttagcctccttttgggggagcctgtcaggggcaccctctagctgactgtaaaacgagggggttgcccacatcccctcccttgttctagaattctgggacagcttctgccctggggacattttcccattcttttctggttgcctcatactcccagccagctgtctcttctcctttaaggccgagcctgccatgggggtctggtggggtactgagtatcgggggaagaagaggcacctttcagcccttcagactcctgtttgcccctcctctgccaataatacagcacggggcaagggaggggctgggcgagaagagaggccctgaggcaggaagatctgctcagaaccctggtgtgggctcagccacccccatccaatgacctgactactctcccttctcctcagatcctcacagccaccgtggacaatgccaacatcctgctacagattgacaatgcccgtctggctgctgatgacttccgcaccaagtgagtcctagctgtggccttgggcagcctgggccagctggcggaggatctcagggtacccctcctgaccccaggattccttggttgcttgtggcaaggcccaggagctcagggtggggcagtcctaggagccccactccttagtccaggatgcagtgaaggcagccagttctgaaggttgctgagcttaggcagggaatagaagagaaggaggggaggcgggaggcgggaggcagagagaagtaaggaagctggtgggcgtgggatctggccctgtgatggtcccggggtcccggggctggaattcgtttccactcgaccctctcatcagcccttccaactccttagagtcctggcaaaatgaaggcaggtgagcagccaggacctggatctgcaggtccaagcagcctgggctgaagtctctgattcccacggcaggtttgagacagagcaggccctgcgcctgagtgtggaggccgacatcaatggcctgcgcagggtgctggatgagctgaccctggccagagccgacctggagatgcagattgagaacctcaaggaggagctggcctacctgaagaagaaccacgaggaggtgaggtggctggggcagaaggtcaaagatgctgaggagtgggtggcagagccctggggctgggcaatggctgaggccgtgggagagagcagagcaggtgcaccgggattagtcaccttagagggcttccctgtctgcagagccctgatccttggggtccagtgtgcagggcagactcctctttgtaccacactgcttctctgtacacaaggaacctcccaggggcctgcagaggctccctctacctaccctgcctccctcatgagggtgggggataagtaaggaaatcttgtcccatttcaaactctcaaagctgaacatctacatagaagcttggaaattagaggggaacttttgggggcataggcctaataattagattttattttggagagtccttggtctaatgggggagatagagtctgatggtggaggcaatactgagcagatgaataaaaatcatttagagggtcagatagagcagagggagaacaaaggaggggtccttgtgggaagtggggtccccttgtgggggaaggcttgggagtgagaggtcaggatgggtccagatgcgcacatccacatcccctttttccataggagatgaacgccctgcgaggccaggtgggtggtgagatcaatgtggagatggacgctgccccaggcgtggacctgagccgcatcctcaacgagatgcgtgaccagtatgagaagatggcagagaagaaccgcaaggatgccgaggattggttcttcagcaaggtggggggtgctgcaggccagagggctctcttaggggctggggctcaggggccttagcactgacagtaagcccacggccagatgtcttggaggtgcccctcctcagtaagctgcatggaccacagggtcacccactgcatcaacagacatggagctgagctcaagctgggatctggcgggtgggtggggaggtagggagctccctcagaataaaggcagagggtaaagaccttgggagtccccacgtctccctcaagaagtcaggaactagcatcaagagccaggctacatgttctggcttgttctcaagtttccggtctgtgcctcccacacgctgggattaaccataaaaagttaacatttcaaatggcatgtttctgggctttgggatgtgggaagctggtgagaaggcacactctctccacagttagatttgggaggaggcctgacttgggagagggatccaggctcacaccgccctgtcctgtgtcctgtctgcagacagaggaactgaaccgcgaggtggccaccaacagtgagctggtgcagagtggcaagagtgagatctcggagctccggcgcaccatgcaggccttggagatagagctgcagtcccagctcagcatggtaggaacagtcctgtgcatgggggagggcccagaagagggcattgaccatcctcactgacccctggtcttcctgccctcctgcagaaagcatccctggagggcaacctggcggagacagagaaccgctactgcgtgcagctgtcccagatccaggggctgattggcagcgtggaggagcagctggcccagcttcgctgcgagatggagcagcagaaccaggaatacaaaatcctgctggatgtgaagacgcggctggagcaggagattgccacctaccgccgcctgctggagggagaggatgcccagtgagtgggggcgcctggggtcagggctgggggtctcttggcaggggtggggctctcagacccacatctaatttcctctctgtttttttttttctttcagcctgactcagtacaagaaagaacgtaagtatctgcgtggcttcggccctgggggttgggtgcatgggacaggcagcccacctgcacgttgctggggcagggtccccaggagctccaggagttgatggctgtccctcagcagggagaagtgactcattagcactgaggattgatactcaggaaaagatcaaatgagagagacactgtctggtctgatgggggtggggcagggaactggtccttaccttggagatcctagtctgatggaggagacaggtcccagctctggagattgtcatctgatgggaagataggaacatggtctcatgatctttgctcttgacagcttttggatgagcaaaaacagtcctgtctctggggtctgtagcctgatgggagatagggacatggtccttgtcctccaaattccaatctgatggagaatatatgatcctagccttagggttcctagtctaatggaggagataggggcctggtttttgtcttggcgatcccagtctgatgggggagatggtagaaaatctatgtcctagagactgcagagaaatggagacggatttcatggagtctacatggctcctccctggcaggacacactggatcagaatcaaataacccatctggggaggcaagactcacacagggccaccggcagagggatgggatggaagggaggtggtggcagggacaggagggatgtgtgtgcagtgtgatgtcgaggtgccagtggaggcactcacagcacctgggggaggatgagggagagagccggctcctgtccatgagggctagggggcaagcgagggcctcctggcccctacccactttaaattgcctgcttctcctgcagcggtgaccacccgtcaggtgcgtaccattgtggaagaggtccaggatggcaaggtcatctcctcccgcgagcaggtccaccagaccacccgctgaggactcagctaccccggccggccacccaggaggcagggaggcagccgccccatctgccccacagtctccggcctctccagcctcagccccctgcttcagtcccttccccatgcttccttgcctgatgacaataaagcttgttgactcagctatgaaatgtgtccttgttctggcccctgaagtggggactagggac

SEQ ID NO: 476 - DNA, 508 bp, Homosapiens
  misc_feature: n=a,t,g or c
ttttttttttttattatttagaaatgtaaacatttatttaaaagtaggtagcaagttaaaaatgaatacttgcctgaaatcataaaacataatcaagttctttttaaaacagttaatttttttcctataatttactttcatcgaaagtatattatctttgtttaacatgctagatagaagcaatttagcaacataaaatatattagctatagtatgttcaaaagaatgagaaatataaattcagagatgagaccatcattttttgcagttaaaaaaaaaaatgttgattctggtgcaacatacactgattatccaggttttacattttagggctgaaaccctgaggaacctgctggtgactgtttagcactngagcagagttcagtgtggcatgcgcttcccagagttaaaagcnaaagcagactggagaaacnaaaaacccacatccttggcatttcngaggttttcacctggtaatcntagggtttccccaatttattagaatgtt

SEQ ID NO: 477 - DNA, 362 bp, Homosapiens
ctaagaggctatttattttaaggaaagttgattaatatttaaatgattaaaaaataaatcaatgttaagtattaactgcacaaaatctaaaaaaaagaccacattacatcatactacattatatagatagatttaaagcagctaactagaagcctttttaaaaatttaaagtttctgacatcattttccaccattccatcaattcttccttctcctcttctttcctttcagaaaatgactccagttcaaaatcaaccccagcagcagggctgtaagggaactgccactttctttgttattgccagatagcctgggagctgaggctgtaaggtttatagtttccgggtataagcaaatctcca

SEQ ID NO: 478 - DNA, 446 bp, Homosapiens
  misc_feature: n=a,t,g or c
agcaaaagacattttttattgagaagtgaggaaacacacagatcagagaagcaggttctaaagggatcgtatccacagttattcttgtaatcaattagccagaatgaatggatgttctcaacagaattctgggacaagaatgaatgagttcccacattttctggttcatgtacaaatgaattacagactcaaaattctgaaaaagagattaccattatccaacaatgggtaaaatgctcacctgtagctagtggaacggatacctgaaagacactaccacaggaagcaccccagagaggggaggtatttctccagagaaaacaggggtgctcatgtcaatcaatggacaacaggcatgggaactgcaaaatataataaacgttcattataatgagttcttcttaagcgggccccctgtnattaaatgccagttctgcttatngaaa

SEQ ID NO: 479 - DNA, 359 bp, Homosapiens
  misc_feature: n=a,t,g or c
tttttttttttttttttttttttttttaatggggcaacgtttttatttctgtacatttacatacaaattttccccaaaggtacaacagatgcgacaccatgcagacacgcagctgtgaacgacagttcaggaactcagcgtaagttgttngctatgaacgagcaccgtcagagaattcccacccacacggtacaggaaacacagtttttatattacaacctcaaggnncagggagggaagtnttcgccgctaggacatgacacaccatactgcttttccaaaacacacgggttcatgaaaaggcgaggtgggtgccttctaggacgagggggacagctnttagttgtgggacctccccc

SEQ ID NO: 480 - DNA, 1391 bp, Homosapiens
ggacctgtgttacttcccttgtgaagaaacagaattatcatgaaaatttaggtggaaaccatttcgcttttttcttcaaaaataagggaagcatgtgcccaaccacccctgggaaaaagaaccttcaggggcaaaggagcgaacaggtaatttataagaaaaacagaaagtggtcttcttgactgccccagacttccttcggagttgggggaattggggacgcctggacgcgttgtttttgtgtttgtggaaaaaataaatgaaggagcatgaagcccgaggcttctgagatcctttcctgaccaaacccaagtgatttggtgtcggggaattttaatatttttccccttttgtgaggtggaacaaacacaacttgggagcagcgcagcggctcagagcctgccagccaggcgggcgaccagagcaccaatcagagcgcgcctgcgctctatatatacagcggccctgcccaggcgctgcttcatcggcgctttgccacttgtacccgagtttttgattctcaacatgtccgagactgctcctgccgctcccgctgccgcgcctcctgcggagaaggcccctgtaaagaagaaggcggccaaaaaggctgggggtacgcctcgtaaggcgtccggtcccccggtgtcagagctcatcaccaaggctgtggccgcctctaaagagcgtagcggagtttctctggctgctctgaaaaaagcgttggctgccgccggctatgatgtggagaaaaacaacagccgtatcaaacttggtctcaagagcctggtgagcaagggcactctggtgcaaacgaaaggcaccggtgcttctggctcctttaaactcaacaagaaggcagcctccggggaagccaagcccaaggttaaaaaggcgggcggaaccaaacctaagaagccagttggggcagccaagaagcccaagaaggcggctggcggcgcaactccgaagaagagcgctaagaaaacaccgaagaaagcgaagaagccggccgcggccactgtaaccaagaaagtggctaagagcccaaagaaggccaaggttgcgaagcccaagaaagctgccaaaagtgctgctaaggctgtgaagcccaaggccgctaagcccaaggttgtcaagcctaagaaggcggcgcccaagaagaaataggcgaacgcctacttctaaaacccaaaaggctcttttcagagccaccactgatctcaataaaagagctggataatttctttactatctgccttttcttgttctgccctgttacttaaggttagtcgtatgggagttactgaggtatcagacgaattgggtgacggggttggagagtggccgtggtgaggttacagcatttaaacctttattgcggcttctaggtc

SEQ ID NO: 481 - DNA, 454 bp, Homosapiens
tttattcaagatcaattttatttgttgtaaaaacaaacaagcgttatgttccagacagatataagtgagtagacttatgccctggtgcctccttggctcttcacaggatgcaaaaacaaatctcgccagcaggaggtggcaggctgcagaggtggctggttgctctttgagccatcttggccttgcctggcatgcacaggccccagcacagcaaaacattcagggagtaagagtgttgcacaaaggattttaccaacctcgtcacattaagcagcattcaaggatttgctgaccaccacttaagcaaattttgtgttatgctatagcaatgaacttacttgttctatttcgaaacaaaatattgggttcacacagaggcctggacaaagcttcccacttctgaactatttactgatcttcttattctcaaagaatgcaagatgaatgatgtgca

SEQ ID NO: 482 - DNA, 342 bp, Homosapiens
tttaggaggctgtcaataccccagaacatggtgtatgttttgttttgtttttgctgtggaaacctggatacagttatacctatcataatcataactgcattttatctttttaacctcattaggatgtcatacagatgatggtaaacttttcagtttacaagttaaagtgctgataaaagaataggggccaagttctggatcaaatttttgagtataatctgctacaaaaatgaaagattgcaaatatcataaacgtgcaaaaattagcatctcctccaaatatttcatacttatcaaagaggggaaacatagatctttctctccttacttactatcttgagg

SEQ ID NO: 483 - DNA, 237 bp, Homosapiens
  misc_feature: n=a,t,g or c
tttttttaagaatcttctgggcctctttattaagagccctctgccttnccaggggagggaagcaaatccttcagggcccccagagttcctgcaccccatatcatgggtgagnctaccagccacagagccacccgtcaccgtggagaggcttaagntgcactcagagctccccccgggcatgccgaatgtagtgttgatgcagccctgcttcctgagcaaagtcctgaccgcactctg

SEQ ID NO: 484 - DNA, 252 bp, Homosapiens
ttttttttttttttaaaagcttcaagatgcttttatgtcaagggtgtggggttgccctgcttggcctgcagtgctttggggccccatgtggtggaggggtgggcaccatggtacccaccaccctgctgcctgggcagaagtgcaacatggcacacgatgcctgggggatcactccccccagggactcatggtcagtgtccactcacaaggcctgcttccctcatgacatctggccagtgacacccacagggg

SEQ ID NO: 485 - DNA, 147 bp, Homosapiens
  misc_feature: n=a,t,g or c
gatcttcaatgcctctaagtcattgtaataaaaaatcagttatcactataccatgctataggagactgggcaaaacctgtacaatgacaaccctggaagttgctttttttaaaaaaataataaatttcttaantcaannnannanaa

SEQ ID NO: 486 - DNA, 448 bp, Homosapiens
  misc_feature: n=a,t,g or c
catatccatnnatcatattttattagctgtcaataccaccnttccattcatggcctgtgttttaattaaatttcataaactaccagtacaaatcaatacaatgcattttttaacacaccaacagcttgaatgttcttgaagcttttaaacaatgagtttactgtgagcaaacagaagcaaggactcaaagagatanttagctcatgcatctggngctggctaatanttttcacatgantgangaaaccactctatgttaactgtatttntntnnnaaanatagtttganatgggtaataaaatgcaattttcagaagcatcttgggtgntcgaggtaggacctgccttantttangagatanttcaggttacttccccctgggccggggggtgggatancatgtngccaaaancttcccntcccccctaggattctgggccggtgggg

SEQ ID NO: 487 - DNA, 190 bp, Homosapiens
aaaaattatagctcttggattccaaattcctatgcccccgatctgcaagcctcgtgggctctggagcactcgtggcggagtgtgtcagtgtgtctgcacgcacagtgaagggtgtgaactggattctagcacctactgagaaatcaaggaaaagaaaactaaagccaaaccccaagattgcagggaagct

SEQ ID NO: 488 - DNA, 396 bp, Homosapiens
ttctgagtcaatctattttattgaccaaaagattcctgtggaaacaggaggtgagtgccctaagccctcactccttagcactctgcgtgctgatgtagtcctggagaagcgcctgcgcctccatccgccggctcatcttggtggccttgcctgaaaacggcctttcttccctgctcctttgccttccaggacctcagccaccctgggccccagggtctccacagacgcaggtggccctgccagtaagaagagtccaccacctttctcatcgcccacagttaagaacaggagggtctcctctgacccaatctcattggcaatgatattcatgaactctgaatcaccctccttcctgtgtaatatgaccacacctccccagtctggactgttcctgag

SEQ ID NO: 489 - DNA, 355 bp, Homosapiens
  misc_feature: n=a,t,g or c
ccactggaggtggtctttattactgtcgccatgatgtgaaaagaggaagacagcacccattcccacgcctcctagacactgtgcaccaacaactgtctgctggggttagcacggagctgtccccacccccagggtcagagcacccacaggtncgaagctggcccaggagacccccacgntgctgacgctgtttgccttgtgtctgcacaggcctctactaaactntcccacacaattagtgtcttaaatatatgtacacgtatatattttgtcccaactgtgtcagttataaaatgaaaactgaccacttctccttacgttatcttcacaggtaggctntgcaggaaggncaaca

SEQ ID NO: 490 - DNA, 194 bp, Homosapiens
  misc_feature: n=a,t,g or c
ggaaaatgaacagtaaatttattgaaactggtttaggggcaggggatgggaggacagctgggggttttccaaagagaactgagggaggagccagcgcccggccaggngggagcgggtgcctggccacagaccctatctcaggcccagctncttctttccctgnctnctacttgaggaccacgtccagattccgg

SEQ ID NO: 491 - DNA, 1960 bp, Homosapiens
gagcagctgcaccatcccggcgttcgcgtgtgccgccgctttcctcctccatctcttttcctccgcctccgccggcgcgatgggcgaaccgctgacggacagcgagaagcggaagcagatcagcgtgcgcggcctggcggggctaggcgacgtggccgaggtgcggaagagcttcaaccggcacttgcacttcacgctggtcaaggaccgcaatgtggccacgccccgcgactacttcttcgcgctggcgcacacggtgcgcgaccacctcgtgggccgctggatccgcacgcagcagcactactacgagcgcgaccccaagcgaatttattatctttccctggaattctacatgggtcgcacgctgcagaacacgatggtgaacctgggccttcagaatgcctgcgatgaagccatctatcagttggggttagacttggaggaactcgaggagatagaagaagatgctggccttgggaatggaggcctggggaggctggcagcgtgtttccttgactcaatggctaccttgggcctggcagcatacggctatggaatccgctatgaatttgggatttttaaccagaagattgtcaatggctggcaggtagaggaggccgatgactggctgcgctacggcaacccctgggagaaagcgcggcctgagtatatgcttcccgtgcacttctacggacgcgtggagcacacccccgacggcgtgaagtggctggacacacaggtggtgctggccatgccctacgacaccccagtgcccggctacaagaacaacaccgtcaacaccatgcggctgtggtccgcaagggctcccaacgacttcaagctgcaggacttcaacgtgggagactacatcgaggcggtcctggaccggaacttggctgagaacatctccagggtcctgtatccaaatgataacttctttgaggggaaggagctgcggctgaagcaggagtacttcgtggtgggcgccacgctccaggacatcatccgccgcttcaagtcgtccaagttcggctgccgggaccctgtgagaacctgtttcgagacgttcccagacaaggtggccatccagctgaacgacacccaccccgccctctccatccctgagctcatgcggatcctggtggacgtggagaaggtggactgggacaaggcctgggaaatcacgaagaagacctgtgcatacaccaaccacactgtgctgcctgaggccttggagcgctggcccgtgtccatgtttgagaagctgctgccgcggcacctggagataatctatgccatcaaccagcggcacctggaccacgtggccgcgctgtttcccggcgatgtggaccgcctgcgcaggatgtctgtgatcgaggagggggactgcaagcggatcaacatggcccacctgtgtgtgattgggtcccatgctgtcaatggtgtggcgaggatccactcggagatcgtgaaacagtcggtctttaaggatttttatgaactggagccagagaagttccagaataagaccaatggcatcaccccccgccggtggctgctgctgtgcaacccggggctggccgataccatcgtggagaaaattggggaggagttcctgactgacctgagccagctgaagaagctgctgccgctggtcagtgacgaggtgttcatcagggacgtggccaaggtcaaacaggagaacaagctcaagttctcggccttcctggagaaggagtacaaggtgaagatcaacccctcctccatgttcgatgtgcatgtgaagaggatccacgagtacaagcggcagctgctcaactgcctgcacgtcgtcaccctgtacaatcgaatcaagagagacccggccaaggcttttgtgcccaggactgttatgattgggggcaaggcagcgcccggttaccacatggccaagctgatcatcaagttggtcacctccatc

SEQ ID NO: 492 - DNA, 1786 bp, Homosapiens
tgtccttggctgagaaagtgatcccggccgctgatctgtcgcagcagatctccactgcaggcaccgaggcctcaggcacaggcaacatgaagttcatgctcaacggggccctcaccatcggcaccatggacggcgccaacgtggagatggccgaggaggccggggccgagaacctcttcatcttcggcctgcgggtggaggatgtcgaggccttggaccggaaagggtacaatgccagggagtactacgaccacctgcccgagctgaagcaggccgtggaccagatcagcagtggctttttttctcccaaggagccagactgcttcaaggacatcgtgaacatgctgatgcaccatgacaggttcaaggtgtttgcagactatgaagcctacatgcagtgccaggcacaggtggaccagctgtaccggaaccccaaggagtggaccaagaaggtcatcaggaacatcgcctgctcgggcaagttctccagtgaccggaccatcacggagtatgcacgggagatctggggtgtggagccctccgacctgcagcttcagcacctgccccacccagagtgggagtcaggtggagccacctgctgggctcccccagaactttgcacacatcttgctatgtattagccgatggctttagtgttgagcctctggattctggggtctgcggcagtggccatagtgaagcctgggaatgagtgttactgcagcatctggctgccagccacagggaagggccaagccccatgtagccccagtcatcctgcccagccctgcctcctggccatgccgggaggggtcggatcctctaggcatcgcttcacagccccctgccccctgccctctgtcctggctctgcacctggtatatgggtcatggaccagatggggctttccctttgtagccatccaatgggcattgtgtgggtgcttggaacccgggatgactgagggggacactggagtgggtgcttgtgtctgctgtctcagaggccttggtcaggatgaagttggctgacacagcttagcttggttttgcttattcaaaagagaaaataactacacatggaaatgaaactagtgaagccttttcttgttttagaatgaaaattgtacttggtcacttttgtgcttgaggaggcccattttctagcctggcaggggcaggtcctgtgccctcccgcttgactcctgctgtgtcctgaggtgcatttcctgtttgttacacacaagggccaggctccattctccctccctttccaccagtgccacagcctcgtctggaaaaaggaccaggggtcccggaggaacccatttgtgctctgcttggacagcaggcctggcactgggaggtggggtgagcccctcacagccttgcccctccccaaggctcgaacctgcctcccattgcccaagagagaggggcagggaacaggctactgtccttccctgtggaattgccgagaaatctagcaccttgcatgctggatctgggctgcggggaggctctttttctccctggcctccagtgcccaccaggaggatctgcgcacggtgcacagcccaccagagcactacagccttttattgagtggggcaagtgctgggctgtggtcgtgccctgacagcatcttccccaggcagcggctctgtggaggaggccatactcccctagttggccactggggccaccaccctgaccaccactgtgcccctcattgttactgccttgtgagataaaaactgattaaacctttgtggctttggttggtt

SEQ ID NO: 493 - DNA, 548 bp, Homosapiens
tttttttttcaaggatgaacattttattggaatataggcacctggcagagtaaatacatggttacaaagtgttttaagtttatttgctttatatagtgaccgggaaagtcaatccacagtgtcgattttttttcttgaagttgcagactttagaaggcaaaccctcaaacccgtctctttatggtaaagtgtgaaggcacatgttgccaactgttgcaccgactgatactattattaagtcaatgatgtccttcccttcttcacatcaaaattgctatgaatcacatatcacttaaccttattataatgaacgaaaatcacttttgtcttggggaattgtgaaaccttttgaaatcactagctctgacatagaagattaccagacttgagaatttttataataaaatatgtaagggcagaaagcttttggacaagttggaatcttacctggtagtctccaaatccttttttttttttttaagaaaggttccatgtgtaatgcaagcactatggctctgcttaagccacaggggaaaattgcagcccgt

SEQ ID NO: 494 - DNA, 473 bp, Homosapiens
  misc_feature: n=a,t,g or c
acctataaatatattttattcatacttttaaatattttacaattcaaataaaaaccttatatgtagacaatctgggctaaatttccatgtatgttttgaaaaataatgttagcatgaatagattcatatttaaatatgattttaaatactcttaatagaggagacataagaaatatttacataaaagctaagtagcatgatacagctcatggttattttcctcataggaaaacaattacttgattttttttttttgcataggattaagactgagtatcttttctacattcttttaactttctaaggggcacttctcaaaacacagaccaggtagcaaatctccactggcnctaaggntctcaccaccacttttctcacaccnaagcaataggtaggnatccaggncccaccttctgagggnccggaaggaatgggttccggaaaataatggnttttaaaanattaccattaag

SEQ ID NO: 495 - DNA, 722 bp, Homosapiens
  misc_feature: n=a,t,g or c
tgatttaaaaaagatttatttacttgttgaatatttattagtagtagtagtaataaatataaccccgaagccacaaataaccttaggattctctcagctttaatggcagtagagtccagcttcttaatcttttgcacaaaatacactcaaggaggagctatccataagactaatagaagacttttgtctccctgacccagctcctctaatttcatatgggaaacacctaacagccataaagtgatgatctgggagtcctcattagagatgggctggacatgtcagaaagctgaagaaagaaatcaacctatttcgtgaaccttaccatctaaaattgttagtctgtgtcttctaaataaacagagacctttttctcttgggttgagccnttcccccttccntttggattttatctccaccacttttatggaggctccttacacgttacctcatttattctcacaacatgcctgtaaggtagggaggggcagggactgtccccgttttacagaggaggaagttgaggcacacagaggtcaagtgacttgcccaaggtcacagacggcggccaagctggaaatgggccccggagcagacccttggttcacctggggacggggggggggtccccctgcagcaagcgccaccaagaggatgtctcggatgccaganaggcgcatacacagcatagagcagcccctcaggtactggcttggcttcgg

SEQ ID NO: 496 - DNA, 426 bp, Homosapiens
ttttttttgtctttattcatttatttatttattcattcattttgtgcccttctgggaatgaaccaggactatttgaatggaaagagaaaaaaaaagctgtcatagtttaaaaattggcatatgttctcttccagattaaattcccttggaccttttaatttatgctagaacaagcacttatcttttcttttttttattactaagcccaacacagtgcgtggcatgcagtaactgttcaaataatgtttgtttaattgacgggttttaagctcgataacttagctaagccctttgcacagtctaagcctaatttggaatgctttcagtcttacccaggccaataaaattttcttgcctcatctgaatttcctgcaaatgtgattaattaataagaatcatcaagattaattaataagaaattgatag

SEQ ID NO: 497 - DNA, 392 bp, Homosapiens
ttttctatttaatagtgtctgacatttattaaaaataaggaaaaaacctttgtacaggtagtgtattagagcagggaagggagcagggcttactgtgttgaacaaaaggcacccatcagagagacagctgcaaattcagaagaaaacaggattctaggcaaaactaactggtccacaggagaaaatgagagattcgatttggttgccaggcacacttaagccctggcagctatgtggcaggaacacaagaggtctctggggatggggaggaaatgggtctcgctgaaggtgacaggctccttgggggacggccagctgtctggatcactgtccaggggctgtgtccagctcggatacctccgaggtgagtccacatcactaggagccacagt

SEQ ID NO: 498 - DNA, 287 bp, Homosapiens
caaagtttaattcaattttattttccacttttagtatttttcaaattatacaacatgcagtctgccagagtacccatacatcttcattttagaacctagaagattaccaaaattttccgtgggccagaggagggtgacttccagatcttttgttacatggactatagtacagcatcgttattgatataaaccaccattctcccctcaaaccccccggacaagtttgtccacaatttttttaatgtgaaagctactgtacagatacttaaagcccggagaacacacat

SEQ ID NO: 499 - DNA, 352 bp, Homosapiens
  misc_feature: n=a,t,g or c
cgagatttattttttgtttgatgaatctgacaccagtcagggagaggagaatgttgtgacccagcagaaaaatatggccccagaggaggggcggcttcttcctgcctgggtgggtttggtgctggggttgatttgttattattttttaatttgttgctggaaggttttcttttgtttacttttataaatctctccccgggcttgcgagcttcccctccgctccnagcctccccttcccctgcccccaaatttcatttttaaaaagcgagcttgctcgcnagcgtgtgtcccccaagctcccanagggntctaataaaataaaggagcacctgtaaaacaggtagctttgact

SEQ ID NO: 500 - DNA, 298 bp, Homosapiens
ttttttttttgagaagccgtgacaagtcttaatgtgccatttcaattcaaaggaggggagggaggaaatgttcttgtttgttcgctcatcaatatgatgaggtctcgtgtcccaaaccacattcaggcagttcccgagtctgcttttgaacaggacgtgcgggtccagactgtggccggcccagtggggtgtgtggttcccggccccgcacctggacgctgccggtggggtgggggcgggtgggcgggtggatagacggacaaagcagcagcctggtgtgcagccgggctcccggccg

SEQ ID NO: 501 - DNA, 250 bp, Homosapiens
  misc_feature: n=a,t,g or c
tttttttttttttgaagaaagaaatctttattaataatcttaataatactgttagtttgaatggtcacaccttggaagcatacagaatggtaagaaaggangcccggggctcggctgcagtcctggggatctgagtgagtcggggngttgagctgctgcaaaaaaagggtccggaacagcagaggggacagggggctctntacagaggacaaagccggacngtgtgacgtggggctatntacaacgggat

SEQ ID NO: 502 - DNA, 813 bp, Homosapiens
ttctcgggaggcagtctgggtccttccaccatggcacctaagaaagcaaagaagagagccgggggcgccaactccaacgtgttctccatgttcgaacagacccaaatccaggaatttaaggaggccttcactatcatggaccagaacagggatggcttcattgacaagaacgatctgagagacacctttgctgcccttgggcgagtgaacgtgaaaaatgaagaaattgatgaaatgatcaaggaggctccgggtccaattaactttactgtgttcctctcaatgtttggggagaaacttaagggagcggaccctgaggaaaccattctcaacgcattcaaagtgtttgaccctgaaggcaaaggggtgctgaaggctgattacgttcgggaaatgctgaccacgcaggcggagaggttttccaaggaggaggttgaccagatgttcgccgccttcccccctgacgtgactggaaacttggactacaagaacctggtgcacatcatcacccacggagaagagaaggactaggagggggctcgctcgtggaccctgggctcgtctttgcagagtggtccctgccctcatctctctcccccgagtaccgcctctgtccctaccttgtctgttagccatgtggctgccccatttatccacctccatcttctttgcagcctgggtggctatgggtacttcgtggccgcacatcctacagttggaaatccatccagaggccatgttccaataaacaggaggtcgtgtatttggtcacgacatttctctgaaaaaaaaaaaaaaaaaaaaaaaaaaaaa

SEQ ID NO: 503 - DNA, 421 bp, Homosapiens
  misc_feature: n=a,t,g or c
ttttgagggtaatgcaacttcttatttattaatatataataacaacaattatacagctcatatctgcaactgttaggtctttgttatgtcttggtcactttgtctggactggccgtgaccttcagctccagggtctgggctaggaagacgttccagtgaccttcgtgggggccagcgagcagtcggaagtgctgtgcctctttctggaagtcttgcttcctgactttcttgatctgagtcaagtggaagattctggctgtgtggccttggcagggtacttcacctctctgagcctcagtttcctcatcttttaccagcttccagaggtagatctccaccaagtccgaggcctcngtgttcccaggggcaaagcgacgnaggttngtctngggctttgggggataccggatgttttggacga

SEQ ID NO: 504 - DNA, 410 bp, Homosapiens
  misc_feature: n=a,t,g or c
gaagggtgagaaatttattcagatttcttcataattccccccaaaagctccaaccacgttgccagtccttgggtgctgcagttggtcggggagaggggctgtgtggaggtcaccttctggtagacggagacccgcttttcagactctgtggcgcanagngcgggccaggaacatttgggccactattgctcttagccctgccgcgcctgactttctctcctctactttccttccgaccgtagggaacaagtgtggggatccgctttgggctccaaggccctgcccgcactggcagcaccaagcgggtgtagaatgacttggaaggagcagggaaggaagatgggtgtcaactgtcccggccagtggttgcntgcatgtgtgtgtgaacagggaaaaggccaccctctccc

SEQ ID NO: 505 - DNA, 366 bp, Homosapiens
acagaattccccaaactttaatgctgtgctctgaaaagggaggctggaggttgtggtgggtcacagtgttgctgacacctctggcctccagccctgcatccctaggcaccatgtgaccaggcagtgagaaggacggggcctcactcccatgccagactgctcctcgggctgagcaggacctgaagctctcagggcttccaccaaagcccagcaaacttgggggaggcctgagggggcatcagcagtccttaaaggcctgagcttgcaacactcaggcaggactcggctgagggcctctgtggttgccaccatggggtaggaggtaaagagagaccctggttccagcctgggaaccagtgggtgccc

SEQ ID NO: 506 - DNA, 325 bp, Homosapiens
gcatataccatcattgccactataatagagatagaagatacattaagaaaattcagtttgtatcaataaaacagatcaacacagaacaaggaaacaccatagatatttgtaaatgagatcttctcttttgctactgtgtatatatattcctttatatttatacaaactcacaacacatgacatttcatatttcatatgccactgagaagaggtgtcagtatacagaacataggaagaagaaaaaagcatgagaacatctgcttagttaggaatctgatgaggagagacgtgagagctattgttcctctctctgctcaggccctat

SEQ ID NO: 507 - DNA, 258 bp, Homosapiens
tttttgactggtagtaatttattgttacacacacacacacacacacacacacacacacacacacacacactaggttaacatcaaccaccgcaccatccaggcactccccagccaccacgtgtgggcacaaagacacacacacccctcttggtaggcagatttccctgtctgctcccctcttcctgtgggagaggcatgccttctgggcagtttaaaggtgggaagttacaggggcctaaaaaggtaaaagagcagcag

SEQ ID NO: 508 - DNA, 462 bp, Homosapiens
  misc_feature: n=a,t,g or c
tttcagcccaagtctctttattggaaccgggccccgctggcctcggctcaggcatttccatttccattagtgggaccaacccactgggtgatttgagtgttgagccgctggttggtccagtcctgccggatgtcatcaaggtggcagtcaaagtccacaaggtgctggtgggcccgatcttccagtagagctcccaccatctgccgtgactcttcccagtccctccacatcactaagttcttatccttagggacccagcggagaccttggttctccaggacgatgaccgggggcacacgaggctgaggcaccagtttcttgattatccaacataataagtactgcatcagggaagaattctgcaattcgcccagcaattttcaaggccaggggccaagggctctgatcgttcacagctgcattggcatggtagtaaccagccaccaccagaccgggctgtgn

SEQ ID NO: 509 - DNA, 415 bp, Homosapiens
ttttttaaaatccatacaaacatttattctgtccctgcctggaggtgagggggaagggagtccggagagccccgcagaggaggacggggctctagcgggaagacagtgtccggaggccggtgggctccctctagacggcagaccctggggctaacgaggggccagctgggttctcagaggtcacggactctaggaggtggggcggcgagtggtggaagccggcgcccccgaagaccggccagcccctggagcacagaggcgggtccagcccacactgcgctgagtgaggccctggccccactggggtctgtcccacccccaccccgcaggagggaaggcagcaggcccgctcttcccggtgtgaaagatgctgtgcaagtcatcaggtttaaattaaaaataataaaaataacaa

SEQ ID NO: 510 - DNA, 510 bp, Homosapiens
  misc_feature: n=a,t,g or c
ttttttatacaaacaagtttcttttattgtttccacacattcataataactatagaacagaaagattgttttaatttgctgtcctacttcggtgacctgatgaatacactggtaacagtccccagtttgagtaagatcagttgaagcccttactgtataagtccaaaatttaagaaaaatgaatctcacgatgagcttcctcaggcttcggccgtgcgtggaccagtcagcttccgggtgtgactggagcagggcttgtcgtcttcttcagggtcactctgaaagggttgtctgggcttggtcttgcctcccaggtttcacgcgctgcaggttttacatggctgtggtggatccaggctgggattccttctacttcacagcggtgggagggctcagaacgacagctggggtctttccacagtggacacaaagaggtacgttccagttcttgatcaaatngatcactggggagaaaaggtgaactggggagaataantaacaggccattta

SEQ ID NO: 511 - DNA, 507 bp, Homosapiens
  misc_feature: n=a,t,g or c
tttctattaatctttatttatatgatggttctctggaaagcacttcattttaaaacctgtttctgagataagtagcataaggcgcatttgaagaaatactattgttgtatcacagagaacttccatgccttgaaatcatttttttcagagtattattaataagatggtctagctatgcagagcaaaaaagaaaaaaaatcttcaaaagccaagactgtcaggcacatgaaggtatgcataaactgtcttcacatttaattttgtatgattcgggagatacctccatgtacatctaaccaggtcaggcagcataagtcctcagtaaccctggggtgtgccggcttcaagccaaagtattctgttgagtttggtttgtggagagacatttgaaatgttgcttcatagcttccattttctggagaagtggaagaaatgaagcgtnaaaaggcctaggaaatcctcgtcttctccaggctcttcttctccttctgcagnttcctcctcctc

SEQ ID NO: 512 - DNA, 372 bp, Homosapiens
  misc_feature: n=a,t,g or c
ttttttttttttcacagtgagcattaaattattattccatacagccctggccctggcccttcttgagggagtggggtttntggggtntgcccagcagggatcctgccagatgatgtccacatgagaaggcaggtgtccaacagcttcagcttcacccagtgccccccagacaaataatgacaagtccagggtcttctgatgtgtcaggccagcactccccttgctgatgggaaaaccggggctcggccagccccactgcatcccctcacatgatgatacgaggctctngcactgactcgccaatagacttgtggggcagcangctggctccgttgaggtaggagctcatcattaactattgacgtcctncac

SEQ ID NO: 513 - DNA, 374 bp, Homosapiens
  misc_feature: n=a,t,g or c
acaccagcaagtttattgagtaattaaggtgacagccatagaactttgcaaatgcgtttccataaaagttctgagttacttgactatgaaaagtgaattttcattttaaccaaccccctcctccaatactaccagaaagcatgagattctgaagaaatcttcacaaatctactcttaattatgggtagcaatgttccagtctcaattagggttctgctggggttctgggagttggggagtgaagtgggctcttgagtgggctnccagcacttgtggggaggttctcatcccaaacactggggagggccttgaggtcccccactttgtgacccgccaggactttaaaggatggattccaaacataaatgnccatg

SEQ ID NO: 514 - DNA, 302 bp, Homosapiens
gttttttaaacatagttgctgtaaacgtctatgggaaatacagtctttataataggttctgatagaataattgagtaattcccccccataagtacattttattgactgttactgcataataggcgataaatctgatgcttatttggaaaagaagtaggcattctttagatgagctgtgctttgaagactgttatgaaaaggaataagaagtcagcatagtggcactcctggtttccttttttggcccccgcacagaaaagatggatgtagtaaagaaagttggagtgaaagagaaagttcca

SEQ ID NO: 515 - DNA, 486 bp, Homosapiens
  misc_feature: n=a,t,g or c
atnanaaacaaatagtcacagcatctttatttataacagcaaaacactggaaacaacccaaatgtccatcaacagtgaatggatacacaaaccctggtgcatccatttaaaagaatactaactcagtaacaaaanttaaaactatttagacacctaacaacttggatagatcttaagggtaatttgctgagtgaacaaagccctatctcaaagcttgcgtnaccttacggnttccattttaatagcattcttgaaataacaaanttaggggtaatggggatcagtgggctaccatggggtcatattggggagggacagtgtgaggtattaangagggtagccaagagggaggccggggcgtgggtgggctcatgcctggttaatccccngcactttnggggagggccgaggcngggtgggaccccccggggngtccgaggagtttcagggcccgcctgngggaancacagttgaaccccgtcttct

SEQ ID NO: 516 - DNA, 305 bp, Homosapiens
  misc_feature: n=a,t,g or c
tttagagaaatgtttttattaagcaacatagtttacaaatggaggtaatttcccactgcatagataccatgtgttttttaagttgaggttcttcatgtgtattttcccactttcattaatctcttctttttatcttacatacttttnttcttagattttcccagccaataacttcttgttttaaatgtttcanaanaagtatttgggagtattcatatganaatgatggttgttttcataattgtgnccttctttgtaggatccaaatcngggattaaaatgaattttcncagaaacttctcngt

SEQ ID NO: 517 - DNA, 281 bp, Homosapiens
tttttttttttttggcctgtatctcataattatttttatttagaggaatttggtagtggcggggttggggtgggaggtggtgtgtggacggtgtgaattgacagaaacaatttccctacaccaaaatacaggtatgttttcattctctatgcccctaaacaccctccctgcagctatgcaacgagcaattcacgggaagaggcttctttacatagacccctgtttttggtgttttgatttacttttgtgtatagagttgatctgtccctcttcccattggt

SEQ ID NO: 518 - DNA, 372 bp, Homosapiens
  misc_feature: n=a,t,g or c
tttttttttttttttgaaggcacacggctttttaatagcagcaagtcaggtgcatctgcctcgaggggctaccaagccatcataccattgtggcaaagggggcatgaggatgaggagaaagcaccaatntgagggcatcctcggtgtccacaggtgagcataaggcaggaggggaagcttccaacacatctggatggcgacacccctggncatggcagacataagatgtgagccccttggtgacacaatcagaggctctttgagaggagggggaggcaaggttggtagtggtncttcagggcactctngccatccaaatgccacatgntttggtccttntagctgcaattggataggaggcatgttccatct

SEQ ID NO: 519 - DNA, 112 bp, Homosapiens
  misc_feature: n=a,t,g or c
ttttnctttattgatatttttgtctcactctctgtcacccaggctggcatgcagtgacacgatcacagctgattgcaagcttcgatcttctgagctcaagtgatcctcctgc

SEQ ID NO: 520 - DNA, 445 bp, Homosapiens
  misc_feature: n=a,t,g or c
ttttttttttttatgtttgcagaaaggcaggaaactttattgaataatcttttctttggggtagagaagttgagaaaccaaagcgtatccaggtcagagaggagagagatccgacagaacgagaagagcacagagggcccaccatcaggagagagtcaggacagggggtcctgagagcagagggactgagccttgggtccagcagcccctcctctctcctgcagggaactgccggctctctcctcctctgggtgctgaagacagagggaggggacgccaggcaagatttaaggcctacggacatcagaagtgcggcgaccagaaggcattagaggtggtggtaacagaggcantaagaattcttggtaacaaaaggttgctacggggggttnacgcttcntggctgaaggaaggggaaaccaatcatntttgggggtcctggncc

SEQ ID NO: 521 - DNA, 324 bp, Homosapiens
  misc_feature: n=a,t,g or c
taaatgtacatttactataaaagctgttgcattttagaaaacttgttgtttttattttttactgtttctcagaggcattttagaataaatactttaaatgaaagttagtataaccgatatagaacactggcccacccagagcagtaacatcttttggacggactcacatatgaggtgggatcatttcagtttgttaaatcttacactgcgtataggataactataatatgtattgcattaatcacactacatgggaagggnaatgtcaggggaggttcgcctaggtggaaaaaaccaaaaggttaccccatttatttttattaa

SEQ ID NO: 522 - DNA, 290 bp, Homosapiens
tttgtttctaaaaagtttattgtaaaattcaaagcttcaacagcagcatcctttagaaaacgaagcattgcccggatccgttttgaaaaagcagcgcagtcggctaagtccttcacgctcctgcaactgtaccaagtccagggcgccgctccttcctgccgagcgcaggctgctgagtcacgcctgcccggccagtctgtccttcctggccctgaggccaacgtcctagcctaggccttcctgggcgagcagccgctccagacacttgcagagtcctcagctcggaccag

SEQ ID NO: 523 - DNA, 291 bp, Homosapiens
  misc_feature: n=a,t,g or c
ttttttttttttcttgtggccattcccaggtttaattacaaaccgatccgaacatcccatctgggtcgacagctgggagggcaggattggggggaagctgctgggcgcacggncnaggcaaccacgtccttcccctgctcccaggtggagtaggggcctcacgactgcctcgatatccactgtcttggagcagcctggctaccccgagatcccaggtgacctcaaggctgcctgcacttcagcgccanatgntatcctggcctgagaaccccaaagcaccttaagcgtccc

SEQ ID NO: 524 - DNA, 273 bp, Homosapiens
cacaaacaaagatggtttaatagatttcagcatgtttccacttgacaatgttatacgaaaatagaatctttattaaaatagcaaggcataacaatcactgctactcaggaaacactgtgtttattctttttaatcatcaaaatcaatgactttgggcaagacctgtgaaatctcagagcctgtttctccatctggagaacaggcaggtagggcattgccagctccctgtgagtgggggccactggtgggaggagatggccctggtcgcccatg

SEQ ID NO: 525 - DNA, 323 bp, Homosapiens
ttattttttttttttttttttttgccatatttttaaaatactttattttttacataatactgtcattacaaaaaaatacaaaaaaactactataaaaacattcgggggttgtcaaagtgagaaaacctaaagaccccaccccaggatctggctgaagcagtcttcccccagcttcttcactatgacctttatacaactatgggggtggggtgggatcacacaggcataaaagggctggaaattccccacacagcctccaagggtaagaaatgagtagcttcacatatcacaaaagtgggatttggaagtttgggggtggctag

SEQ ID NO: 526 - DNA, 1709 bp, Homosapiens
ggtacctcctgccagcacctcttgggtttgctgagaactcacgggctccagctacctggccatgaccaccacatttctgcaaacttcttcctccacctttgggggtggctcaacccgagggggttccctcctggctgggggaggtggctttggtggggggagtctctctgggggaggtggaagccgaagtatctcagcttcttctgctaggtttgtctcttcagggtcaggaggaggatatgggggtggcatgagggtctgtggctttggtggaggggctggtagtgttttcggtggaggctttggagggggcgttggtgggggttttggtggtggctttggtggtggcgatggtggtctcctctctggcaatgagaaaattaccatgcagaacctcaatgaccgcctggcctcctacctggacaaggtacgtgccctggaggaggccaatgctgacctggaggtgaagatccatgactggtaccagaagcagaccccagccagcccagaatgcgactacagccaatacttcaagaccattgaagagctccgggacaagatcatggccaccaccatcgacaactcccgggtcatcctggagatcgacaatgccaggctggctgcggacgacttcaggctcaagtatgagaatgagctggccctgcgccagggcgttgaggctgacatcaacggcttgcgccgagtcctggatgagctgaccctggccaggactgacctggagatgcagatcgagggcctgaatgaggagctagcctacctgaagaagaaccacgaagaggagatgaaggagttcagcagccagctggccggccaggtcaatgtggagatggacgcagcaccgggtgtggacctgacccgtgtgctggcagagatgagggagcagtacgaggccatggcggagaagaaccgccgggatgtcgaggcctggttcttcagcaagactgaggagctgaacaaagaggtggcctccaacacagaaatgatccagaccagcaagacggagatcacagacctgagacgcacgatgcaggagctggagatcgagctgcagtcccagctcagcatgaaagctgggctggagaactcactggccgagacagagtgccgctatgccacgcagctgcagcagatccaggggctcattggtggcctggaggcccagctgagtgagctccgatgcgagatggaggctcagaaccaggagtacaagatgctgcttgacataaagacacggctggagcaggagatcgctacttaccgcagcctgctcgagggccaggatgccaagatggctggcattggcatcagggaagcctcttcaggaggtggtggtagcagcagcaatttccacatcaatgtagaagagtcagtggatggacaggtggtttcttcccacaagagagaaatctaagtgtctattgcaggagaaacgtcccttgccactccccactctcatcaggccaagtggaggactggccagagggcctgcacatgcaaactccagtccctgccttcagagagctgaaaagggtccctcggtcttttatttcagggctttgcatgcgctctattccccctctgcctctccccaccttctttggagcaaggagatgcagctgtattgtgtaacaagctcatttgtacagtgtctgttcatgtaataaagaattacttttccttttgcaaat

SEQ ID NO: 527 - DNA, 482 bp, Homosapiens
  misc_feature: n=a,t,g or c
ttaaagagacttagcacatttattcactcacagaggtgaatgaagggctcagggtttgaactcgatgacactgatggcgatccgggctgcccgctgtaaggcttcggccacttgaggcttttcgtaagtctccacctccatggcacggaaagtgggcacgtgcgtctgcagggccttgcggcctncgggggctnctgccagcatggtaagggccttggtggcattcaggcgcgctatggtcatgggggagtgcagcagctccaggagcaggccgatggcttgtgcctccagggccgcatacttcccttcagtgatcactgtgggcgaacatcaggggcanccggcagcgttagactttcacatgctccactggggtctttcagcagatgggaccagggattggggatgacgtcaaaattgacacaccttttttttgccctttngagatantgttgaacattnagggagcgaacgggcgnctt

SEQ ID NO: 528 - DNA, 274 bp, Homosapiens
  misc_feature: n=a,t,g or c
ggttttctacctttaattggggatanaaaaggcacctctcccagtacaagaggatcaaccangaggtganccccagtgctgtggtgcccggncagaaggaacagaggaaggatggaggncaaggcagcggtgaccccagtgctgtggtgcccggccagaaggaacagaggaaggatggagggcaaggcagcggaggggcagtggggcccagcatcccctgaagcctcacctgcagcctggggctgattgagatctcgcccactgcgcgcagang

SEQ ID NO: 529 - DNA, 264 bp, Homosapiens
tttttttttttttttttttttttttttttttttttttttttttttttttccacccatggtggctttattcagtcacgtccccacgcccacggctccctccaccaggcagacagaggggaggccaccccactgcaaagggtcccagccagtgggcaccaacctcaggaagacgtggtccccacctggagcttccctcggctgccctggcccttgagcccgtcctgaggatttgtgctttgactctgacagggagcagcaggaagc

SEQ ID NO: 530 - DNA, 870 bp, Homosapiens
cagagtttcgccatggcccggggccccaagaagcacttaaagcgtgttgcagcgccgaagcattggatgcttgacaaactaacgggtgtatttgcacctcgtccatcgacaggtccccacaagctgagggaatgtcttcctctgatcgtcttcctcaggaatagactcaagtatgcgttgactggagatgaggtaaagaagatatgtatgcaacgtttcatcaaaattgatggcaaggttcgagtggatgtcacataccctgctggattcatggatgtcatcagcatcgagaagacaggtgaacatttccgcctggtctatgacaccaagggccgttttgctgttcaccgcatcacagtggaagaggcaaagtacaagttgtgcaaagtgaggaagattactgtgggagtgaagggaatccctcacctggtgactcatgatgctcgaaccatccgctacccagatcctgtcatcaaggtgaacgatactgtgcagattgatttagggactggcaagataatcaactttatcaaatttgatacaggcaatttgtgtatggtgattggtggagccaacctcggtcgtgttggtgtgatcaccaacagggaaagacatcctggttcttttgatgtggtgcatgtgaaggatgccaatggcaacagctttgccacgaggctttccaacatttttgtcattggcaatggcaataaaccttggatttccctgcccaggggaaagggcattcgacttactgttgctgaagagagagataagaggctggccaccaaacagagcagtggctaaattgcagtagcagcatatctttttttctttgcacaaataaacagtgaattctcgttaaaaaaaaaa

SEQ ID NO: 531 - DNA, 395 bp, Homosapiens
ttttttttttcaaagtcaattaaattttatttcaaccaagaatataaaataaatgcaatgtaatttattttagttttaacagtcatttcaagaaggaagtcaggtcaactcaaaagcaggaaaccctcgctccaaagcagtagctcgtcctgcactccatggagcaggcctcgctggggtgcagcggctctgagcacaaacctcgcagtggagcacgaaaagctacagtcatctctataaccatataaagggggatgcgtgcagaaaatgactgaaaaaagagacaagaacaggtacacttcacaaataggaattataggaatatacaaactaggcagtttagaaaggatatactacataacatatataaaaagtactttaaattgttgttaaaa

SEQ ID NO: 532 - DNA, 348 bp, Homosapiens
ccacagagaaaaattagattgaattaacttttattactacttgtttaacacagatttacttgtcttagacaagtaagaatttatagaatctatgctctattgcactatatagaaactagaaatgcagttatactgatgtagtgcagtttgtgggaaatcaggaatggtgttctccagaatacatgaagattctcattgattgttgcaaggaatcacgaaagagatctttggtccaaagaaaacgtcttttgggcagcagagcaattcgctgaagttgcagtaacagatcatctcacatcccttcccatcccagaaatgatcctgggacattgacatcaatctgtgtca

SEQ ID NO: 533 - DNA, 436 bp, Homosapiens
  misc_feature: n=a,t,g or c
tttaaaaaaaagtgtttatttcctttattttaagattcagtaggatagccaaattcatagagaataaaattacatgaaagagttacaagctcactgttttaaagacttgacatttttcatttagttttaattaacagtaataagtcacctcctgtttttcaatgttcaccaaaaaaagaaacatagaatagggggaaaacatgcttatatagccaaggtacagatccagatgatgtaacctttttagtattcgcatgacttgaaaactgggcagatcaatagataatcgaagtgctttatctgaagggagagggtaaagacagtgtgaccaggtttgttttcagggctgccgaatgagcctcacctaacagtgtccatgggtaattcgctnaccttnacaagatgggaagaagtgagtgctctgatgtcttctgct

SEQ ID NO: 534 - DNA, 464 bp, Homosapiens
  misc_feature: n=a,t,g or c
tgcataggattaagactgagtatcttttctacattcttttaactttctaaggggcacttctcaaaacacagaccaggtagcaaatctccactgctctaaggttctcaccaccactttctcacacctagcaatagtagaattcagtcctacttctgaggccagaagaatggttcagaaaaataatgattataaaaaataacaattaagaaaaataatcacatagaggtaaaataaagcaactaaacatcatagttttgcatttttagaaaagcatttaaacatttagaattatagtaaatatattacatttattctaaaacttcaaaattattctgtttttgtagtactgaaaagaagatagtgccatttggaaacaacagatggcatccttttatacattttcacaagtttgggntttcntattttttaaaggggccccatttatcnggtaacagtggggaatt

SEQ ID NO: 535 - DNA, 332 bp, Homosapiens
  misc_feature: n=a,t,g or c
gcaagttataaaatgtttattgatatacattttgtcttttataaaacttccgttggccacattgggccactgtgcaccacagtncagtccccaggtggccagggcggacagtcgtccactttcgggtgggggctggagcaagaggtgtccaggagctgcccagtgggtcctcatggcctgcgggatacctcaagtgctcccggagcagcctaggactggctcgtcccggagtcacaaaaggcaggtcaactacccaaggcggccaaagnctntcctgtctccagagccttgacataaccagaaatccccccatcaaagtcaccaaatgactc

SEQ ID NO: 536 - DNA, 2653 bp, Homosapiens
ctcaaaaggggccggatttccttctcctggaggcagatgttgcctctctctctcgctcggattggttcagtgcactctagaaacactgctgtggtggagaaactggaccccaggtctggagcgaattccagcctgcagggctgataagcgaggcattagtgagattgagagagactttaccccgccgtggtggttggagggcgcgcagtagagcagcagcacaggcgcgggtcccgggaggccggctctgctcgcgccgagatgtggaatctccttcacgaaaccgactcggctgtggccaccgcgcgccgcccgcgctggctgtgcgctggggcgctggtgctggcgggtggcttctttctcctcggcttcctcttcgggtggtttataaaatcctccaatgaagctactaacattactccaaagcataatatgaaagcatttttggatgaattgaaagctgagaacatcaagaagttcttatataattttacacagataccacatttagcaggaacagaacaaaactttcagcttgcaaagcaaattcaatcccagtggaaagaatttggcctggattctgttgagctagcacattatgatgtcctgttgtcctacccaaataagactcatcccaactacatctcaataattaatgaagatggaaatgagattttcaacacatcattatttgaaccacctcctccaggatatgaaaatgtttcggatattgtaccacctttcagtgctttctctcctcaaggaatgccagagggcgatctagtgtatgttaactatgcacgaactgaagacttctttaaattggaacgggacatgaaaatcaattgctctgggaaaattgtaattgccagatatgggaaagttttcagaggaaataaggttaaaaatgcccagctggcaggggccaaaggagtcattctctactccgaccctgctgactactttgctcctggggtgaagtcctatccagatggttggaatcttcctggaggtggtgtccagcgtggaaatatcctaaatctgaatggtgcaggagaccctctcacaccaggttacccagcaaatgaatatgcttataggcgtggaattgcagaggctgttggtcttccaagtattcctgttcatccaattggatactatgatgcacagaagctcctagaaaaaatgggtggctcagcaccaccagatagcagctggagaggaagtctcaaagtgccctacaatgttggacctggctttactggaaacttttctacacaaaaagtcaagatgcacatccactctaccaatgaagtgacaagaatttacaatgtgataggtactctcagaggagcagtggaaccagacagatatgtcattctgggaggtcaccgggactcatgggtgtttggtggtattgaccctcagagtggagcagctgttgttcatgaaattgtgaggagctttggaacactgaaaaaggaagggtggagacctagaagaacaattttgtttgcaagctgggatgcagaagaatttggtcttcttggttctactgagtgggcagaggagaattcaagactccttcaagagcgtggcgtggcttatattaatgctgactcatctatagaaggaaactacactctgagagttgattgtacaccgctgatgtacagcttggtacacaacctaacaaaagagctgaaaagccctgatgaaggctttgaaggcaaatctctttatgaaagttggactaaaaaaagtccttccccagagttcagtggcatgcccaggataagcaaattgggatctggaaatgattttgaggtgttcttccaacgacttggaattgcttcaggcagagcacggtatactaaaaattgggaaacaaacaaattcagcggctatccactgtatcacagtgtctatgaaacatatgagttggtggaaaagttttatgatccaatgtttaaatatcacctcactgtggcccaggttcgaggagggatggtgtttgagctagccaattccatagtgctcccttttgattgtcgagattatgctgtagttttaagaaagtatgctgacaaaatctacagtatttctatgaaacatccacaggaaatgaagacatacagtgtatcatttgattcacttttttctgcagtaaagaattttacagaaattgcttccaagttcagtgagagactccaggactttgacaaaagcaacccaatagtattaagaatgatgaatgatcaactcatgtttctggaaagagcatttattgatccattagggttaccagacaggcctttttataggcatgtcatctatgctccaagcagccacaacaagtatgcaggggagtcattcccaggaatttatgatgctctgtttgatattgaaagcaaagtggacccttccaaggcctggggagaagtgaagagacagatttatgttgcagccttcacagtgcaggcagctgcagagactttgagtgaagtagcctaagaggattctttagagaatccgtattgaatttgtgtggtatgtcactcagaaagaatcgtaatgggtatattgataaattttaaaattggtatatttgaaataaagttgaatattatatataaaaaaaaaaaaaaaaaaa

SEQ ID NO: 537 - DNA, 391 bp, Homosapiens
aattcggaacgaggcgaaacgtggatgtctacacgaaagtctgcaaatatgtggactggatccaggagacgatgaagaacaattagactggacccacccaccacagcccatcaccctccatttccacttggtgtttggttcctgttcactctgttaataagaaaccctaagccaagaccctctacgaacattctttgggcctcctggactacaggagatgctgtcacttaataatcaacctggggttcgaaatcagtgagacctggattcaaattctgccttgaaatattgtgactctgggaatgacaacacctggtttgttctctgttgtatccccagccccaaagacagctcctggccatatatcaaggtttcaataaatatttgctaa

SEQ ID NO: 538 - DNA, 381 bp, Homosapiens
  misc_feature: n=a,t,g or c
tactgaaatacacagattcacttcagctcagcgtttactgagcatctgccatagggcactgtngcttggagctgggatttaaacagctccagtccctggcctgcacagaaagtgaaggccagtggggacaggcatgtaagcccgtagcagcagcacacccggccacagcggccaagtgcagcaagtactcacagaattccagggcgatgccaagaggctttcagaggggccaacctgtgagccagaactttgaagggaccaacggatttccccagatgggacaaggaacagaatgggtgttattacccaaggcaagattaaagtgttattgggaaggttnacagagggccagccaacatttggggcacaccacaggggcaa

SEQ ID NO: 539 - DNA, 484 bp, Homosapiens
  misc_feature: n=a,t,g or c
gtcattttggttttgttttattttgcatttcatatattatccagtttcacattctcacaggatcagcaatgacaacagccgcctcatctcccaagtctgaaatggccagacggtcacagctgcggctgacagtaaagcactgatatgctcaaaacaaaaaacattgcacagtgtttcnttcatttcattttcttaaacaaatgccagacacaaaggcgtactgctgaagaatggaaacccttttcttcttcatgcctcaaactaaacattaaacttatctgacagggcgaacgaggtcgctttaataattaatggtacgcacatgaaaaatcctttatgatgcataaatattttgttacacagggtacaaaaatacttctcacgttttggttggtttcgaggttttggaagaatgaggagcagcggcgggcggggtgcgctgtggagaggtgacagaccgggcagagagggctttcttacggct

SEQ ID NO: 540 - DNA, 430 bp, Homosapiens
ttttttttcacatttaattgaacaaatatttattaagcacctactttgtgccagacattgtgctaggcccctcactgtgtgctgttcccacagcacaatcatctgctcagaaattaaaaccaagaaaaggaacactgttgcaaccgtacaaactgggggggcggggggcagggggcagtagcgtggatgcaggcaactccgggccagaaaatgcacccaccagaagcttgttttccatctctcagaaagtttccactaaacagttgttttaaagcctctcgatgttgacagagaggaatgttgttctctctgtgccccccggcgtgcgtgtctggtggacattcaaatactctgaatgctatttgataaaaggagcctgatggcttggtgtaaagaatatcaatatttggattacaaaatgcgtgttttt

SEQ ID NO: 541 - DNA, 354 bp, Homosapiens
tttttttttttctgttcaaaaaaggttttatccaaaaaagttaatcaagacaagcaacagatactgcaaagcattatatacagcaccatagtccaggggccaaagaaatcaggaggggctgggcagtagaggaattccatatattaatgaatgtgagattaagtatagagtgaagacattaacacacaatttctaatttctgttaggcagaatgctcccctaccctgatgccacagcctttcacgtttcctaaaccctagtaacctctgatctccatctgcctcatcaacacgtcaccaccctttgctcttcttccaatttagtcacatgttgggctgaatttatttccactcc

SEQ ID NO: 542 - DNA, 437 bp, Homosapiens
  misc_feature: n=a,t,g or c
gaggacagacgtgaaaactgtttattcatacagaggaggttccaagccacgagggcnccgtcgaaaagcacatcacctctgtaacaacacacgagacacggccatggcttcacagctgcagcaaatcccaattcgccccacgacacattcgtctgccctctgaccatcattcaatgtccctccaacttcattcaagtcttctccttaaaactgtttcctaatcttcatgctatgaatggtattttcttaacacataattttgtagataaagaaaaacaattaaagtgtcattagttggtgcttttttatatgagtgaaagacctgacattattttcccctcaagccagaaaaataatagggaggagaaagcatgaagacgtctcatccttaaccccaaaccattcacaccccaggtcacacaggccggctgggtcct

SEQ ID NO: 543 - DNA, 410 bp, Homosapiens
  misc_feature: n=a,t,g or c
tgtgtggttccaactgttttatactgaaatatgtctgagctgatccaaaaaagcgttgggttgggggagaaggaaatgatggaagtggggtgatctcagagctccatgttagcaactctgggagtntgggccggtccatctgtctgtctgcccaccctggcaggacaatcaggcctaggaggtctggaggagctcgccgagctgggcgnaggaggcaggccagtcccatgctggaggggaccccacggccccttctacagggcaggagagtcctcagctgaagggcttcaccagcttcatgggcagcatagttcgggaaggcntagatgaagatggccagggaacagcagcaggatgaagaggatgatgaagaggatgatggcccaacggaaacgccgccacaggatgaa

SEQ ID NO: 544 - DNA, 386 bp, Homosapiens
atctgcaatgaacttggtttattgttagagttggaggtggctccgttacagcagctgggaactatagcagggaagcgtggggaggagcagaacacagcagcacggggagggtggagctaggaagaacacaaggtgggctcattttggtttcccagtcgtttggcagagaaggcaagcccacatgactaccagcttctgggtttctcagtctggcagtagtctggcagggctgctcactggcttgcttggggcgaggtcctctcctggggtggtattttcagcccgttttcatttcactctgtaggagttaagctgtggctcagcttctccctttttccttcctccatctcattttccccaagtcctctggcctgggtttccaccct

SEQ ID NO: 545 - DNA, 299 bp, Homosapiens
  misc_feature: n=a,t,g or c
tttccaggttgacaggttttattccacccccttccatccccatggccaccccaggcaggaggagacaggtgtgctggagtctggtcactttggggcccggcgtgggcagagcccactgggtttacattctctgtgggcaggtgtggacaccagagggctggggcaggaggagcgtgggagcgagcggncgacccccgtctctggcccggcccctgggtaaacgccgactcagatgcctgaaacagacctgggccgagcaaggaaggttgatggtatttccacccagacagaaattcaaa

SEQ ID NO: 546 - DNA, 1420 bp, Homosapiens
cacctttcctgcctgtgtgactaacctaattttgctagttccataaatacacgattagtttagtaacagccatcacaatgtaccatgtacattcatggtgagagctaaagatcgacacagacttctaggagctttgttcatactgattacttaatccaattgtatagattgaatatttgagtggaaggaatttacactctgtttaaatgatgggattctatcgagatagcactcatgatcatgacctttttggtagtattcttaaacaaaattctacagagactaaatgttagcgatgatcctccattttcaattttaaccaattctgtcccctttctcaaaaccctgagccctgtgcatgctttctcagtcttgtggtgggactggatacaatgactaacttcccctcctcccctctttaaacaccattttccatggagttcaaaaaaattttttttcttaacgttacatatcatagtgaatggtttccccagtgtatatgaatgttttaagtgtctccaatagcttatgcagtctaggagctttccaatactcatttaattaagatttaatcatttgctaatggaaatcttaccacctttcattttccctctgttaccaaatttcagctcttaggagctgctctacaattctgaatttgcttttcttgcctctctttagtcacctgtcacaggaggttcctgctcagtaatgatattgtgagttaggataataactttttttttttgtgcttcagatttagaagaaaagatcctgtttccatttgaaaggaactgtaagcttttatcttttaaccaactgaacaatacaccaaaagcagcctagggatgagcatttctttgaaagcaattaggttattcacctggtattaaaactatttactgttaaaaaatctgtgacttcatgaagttgatttttaaaggcagcatcaaaaactgaaaaggaagggaaaaaataggcagcttctctgcacttgtttggagctccccaaaacaggagccatggagaagtggcatcaagaccgggctgccctttcgagaacaccctgtggcagttcagagacacgcttttcctacactgcatgcagcccctctttccagcactggaaagaagtggtcttgagcccagctgagaagcacttcacactcctctctcttgttctgaatggtgtttgtgtcagtctgcagctgtgtatggtattatgtcttataatcctgcatcacttctatcctatccagtcatatctaatgtagaaaattagtttccagtgaaagtaatatgtagtgcttttatgatatttgtgtgcaatatcccctcttccattgaggatatttgatgtaaaggaaaaaaaaaaactcagttccacaataaaatacaaaagtggcaaaagttaaaaaaa

SEQ ID NO: 547 - DNA, 1277 bp, Homosapiens
aagctgcttccctggagacgggcggggaggccaaacttcctgctgaagctctgtggcctcttttggggtgggggcgggggtccaggcagaaagaaactgtctgctgctcaagacccacaggacgcccggaagactaaatgatcactgcccccagtgaatatggtgaagaagctggtgatggcccagaagcggggagagacacgagccctttgcctgggtgtaaccatggtggtgtgtgccgtcatcacctactacatcctggtcacgactgtgctgcccctctaccagaaaagcgtgtggacccaggaatccaagtgccacctgattgagaccaacatcagggaccaggaggagctgaagggcaagaaggtgccccagtacccatgcctgtgggtcaacgtgtcagctgccggcaggtgggctgtgctgtaccacacggaggacactcgggaccagaaccagcagtgctcctacatcccaggcagcgtggacaattaccagacggcccgggccgacgtggagaaggtcagagccaaattccaagagcagcaggtcttctactgcttctccgcacctcgggggaacgaaaccagcgtcctattccagcgcctctacgggccccaggccctcctcttctccctcttctggcccaccttcctgctgaccggtggcctcctcattatcgccatggtgaagagcaaccagtacctgtccatcctggcggcccagaagtagagccatccatccatgccataccacttgtcagggcacaggggactggctgggcccccagggctgctccccacttgcagcacaatgccttctccacctgccctcccactcttccagtccaatccacgctgtcttctgttgcaggactaacctttgagaaatccttttgtgaagtcattgcctgctcaagaatgtacagtggctccccaatgccttggaggccataaggccagccagttctagctctctattacctgtccccactcaactgactcatacctgtttccggctgcatcactatgtgccccacagagaacgatgatcgtcacctctgtgcctgagttctccctgttgtctcaaagcggtacccatcctcccccagaagctgtccccagcgagcctcccttctttgtttgaattctctaataagagcaacagcagctcccatttctagaacacatttacagtattactattttctaggatataaagtgccatatatatttttaattccaatattaataaatgtatgccaaacaacaata

SEQ ID NO: 548 - DNA, 304 bp, Homosapiens
  misc_feature: n=a,t,g or c
gatgtacaaacgtagctgtattggggagggggtggggaggggggatgggggagggacgggtcagtcttccttcaggctcccaaacactgcggctggcacgntctgctgctccagccgaacctcgttgggctccaggtccatctcgtcctcgtcctcgtcctcgcccagctggatctcctcggggttgacctgctgtgccagctctgccagctcctcccgggaggcgtcactcctcacgaacaggatcttgctctgggcgcgcaagggctggtcacgctccgcctcagccgccagctgctctgcc

SEQ ID NO: 549 - DNA, 398 bp, Homosapiens
  misc_feature: n=a,t,g or c
tttttactcttatgttatgaatatttatttttttctccttaaaaatgtacaaaaaataaaataactgtatttatagtttatagattccccctctcccatttacaaaactattaagttacatttaccttttttttttaaaacatgagagcaaattgtacatatatcaatctcccttgcttgtctttaagaaagggccgttcatagcatttggcacaaaccctctatttctgttgcatttgcatgattttaaataagaaggaaaataaacatttgatttatttcatgcttcctaagtttctgggcagggacatgcctnactcttttaggaaaccaattccaagatgacatcnggactgcatttttctgttggtccgaactttctaaacaaacactcataa

SEQ ID NO: 550 - DNA, 406 bp, Homosapiens
ttttaggaaaaaacggcacagtgatttaatggtaagtcactataaacatgaagggaaagactgccatccaaggaagcgcagaaaaggacacccctcaggtcctggatggaggaggatgacccccaatactggatggagaaggatgcccccagtcctagatggagaaggatgcccccctcagtcctggatggagacgtcatgagtaactgtcggtaggaaacatcatgttcttcattctgcccttgctccttgggctccaacaggaaaaaccagaaattctgtggatataaaacatggaaacattcattctttaaagaaaaaggctgcagagacaagaacagcgaaaggatggtattgaatacatgcaaatggataaaatatgaatgattatgttctcatgttcaac

SEQ ID NO: 551 - DNA, 401 bp, Homosapiens
gagggtacatcgggggagaggagaggagaggagagcctctctgtgccttggtttcccatttgtgcattcagggcctctgcaggctcacacagggagtctgaggggatagtgtttaagtgagcactcaggcttcctctgaggaaaagaaatgaccaaagtgcagacttttattactgccattcctgctcctaatgggagcaggagtcaaaaggaaaaacaaattaaaaggggctaatgagaaaggaggagagatgagacagagagtgtgaagggctatgcgcgtggcatctcataaattcttattgagaatggcacaggtattaaaaaagtttctgggtagtctacgagaaatgtcaattattatctctactacaactacttacatatatctaatgggaaaa

SEQ ID NO: 552 - DNA, 245 bp, Homosapiens
tttttttttttctggtccgggttagctttattggagcctcctagcaggccaggtgtttcaggcaccagtagtgctgcaggcacgggggcctgtggtgtggccagctgcaggtgatctcggtggtggactccgaagtgtactccagagaggtcccggaatggcaggggaccagctcgggcactgaggcgctgctggcaggctgtttcgacgattccttctggcgctgtccgctggtcttgggggct

SEQ ID NO: 553 - DNA, 294 bp, Homosapiens
  misc_feature: n=a,t,g or c
gcgaatctgttgatttatttacggctcggtgagacgacgctggacgctggttagggtaagggttagggcaagcattagcagcaggggcatggccctgggaagcacctggaccccagaacataagacaggagggagagatgccatccattcagcgggcacttatgcccacgaccagctgagccagaccagcattcccatttcaccaccccttactcctcaagatgcaaatnaagctcagggctgggcggaagctggcagggctgtccacagggaggacccccgtgtgtctctcgg

SEQ ID NO: 554 - DNA, 401 bp, Homosapiens
tcaatttcttaattagtttttatttattttttaaattttattgcatgtcctggcaaacaaaaagagattgtagattggcttctggctccccaaaagcccataacagaaagtaccagaagacaagcaactgaagcttaaaaaatgtatcacatgtataataccttttgaaaacattaataaagcatataaaacttttaacatttgcttaattttgtacaattataaaaataatagaaaaaaatatccctttaacattcaatatcccacatactgttattttaggggattaccaagaaaaaaaaaaggtaaaaggatttaatgaaaactctgctttccatttctgtttataaacgtctccaaacaaaaacttttcaattcttcagctaactgcattgagctga

SEQ ID NO: 555 - DNA, 365 bp, Homosapiens
  misc_feature: n=a,t,g or c
aacatattgatacattttattacaaagaaactcacacataaatgatttgtcctatttatcataataggccaccaatcactaggagccaagcttcatcagcttaagtcctaggtagcatgtctcaatgcatacatatttatatcgttattaaccgtgtttcttttctttttttcgagacagagtgtccaggctggaggtgatctcggcttaccgcaacctccgcctccgggttcaagtgattctgccgcctcagccttcctgggtagctgggattacaggcacgcatcaccacgcccggctacttttgtatttttagtagagatagggtttctccgtgttggtcaggctggtctcgaactcccaan

SEQ ID NO: 556 - DNA, 348 bp, Homosapiens
  misc_feature: n=a,t,g or c
ttacacacatcagactgggggaagaccattgacatagctgagcaccaggtagggtntcctgggtattcgggcatgagagcagcaggggcctcctgacgcgggcaggagaaacatggcacccaccaggaggaggaagaggaggaagaggataaggaggaaggtcagaggctgcctgggatgcaggatcgggggcccctgggattcccctccagcctcacatcctgggagatgaggagatgcttgcctcttcttgtcctgaggcttccggagcagggagtttctttgggtgacgtgctaagcntttctnggtggcccaggccaganttccagcatntcctnttcgggagt

SEQ ID NO: 557 - DNA, 305 bp, Homosapiens
  misc_feature: n=a,t,g or c
ttaattatngatattccccctcaccgccctcagggancgggagaagtcacacgaccatagggagcttggacttggtggtcgtcacggtgctggcagacgagggtctttccaggaaccccttgctagaatcagccctcatacaagtgtgctcagagatcccaggagcgatggcatcctcccgaagtcactacccccatatgtctccttgggcttcttccccctctctttctggaacctgaccaggcagaacgcagcaactgncagcaacagcacgcccagggagcaccccaatcagagntccggcc

SEQ ID NO: 558 - DNA, 550 bp, Homosapiens
  misc_feature: n=a,t,g or c
catcgtttttgtttttatttttcccctttcaacctggttttcggctctggaagctgttcctgtgcacagttctatttcctacagttctgagaaagcggttccatcgcagatgaccaaaggctggacccctctggctataacgtagaccttccagtgggtggtgtcgacatagccgatatcccctggctctattggcatggccacagactgacaatgtcttcggcactggaagggagggatgagctgcaacatggcctcaccgctgccaatgataaataggtcanggcatcttatgcatcttactccccacaacaggttctgggtgaagaaaggagcacttgtttaaagaggcatcttttnggaaatgncaggtgagtgaaaacaggaaaaagctcacgtaacatttgtnatctgttcanaggtctcctccatggataaggnaatgggaaccaccgctcaggaaagcagcgccaccacttgtcgaaaaaacctttcaggagaangccttctgtcgnctcaggggtactggcacanaaaaatgctgaatctc

SEQ ID NO: 559 - DNA, 374 bp, Homosapiens
  misc_feature: n=a,t,g or c
ttaagacaaacataacctttattctctctcaaaaacccagagaacagggcctggaaccatattcgttaatttaaccagaatcagaatactttaactttcatagtctcatttaaaattttatagcaatatactgaccattctaaaaataacaaaatacatgttgctctcaactacatagttaaaaaaggtagtaaattctcttacccaaaatagaggaggggtgggctagtgagctgctcaaacatttgtaacaaataaaaatgtatctatatacatataatgatcatgttttcatagcctaaaatcaccattaacaaaatctaataataaaattgtgtcgtgttcaggagttgggaagccaacacattaaattn

SEQ ID NO: 560 - DNA, 399 bp, Homosapiens
  misc_feature: n=a,t,g or c
aanattaaaaaaantttcacattttaatatgcttaganggagtttttaaagangtagaantgntttcgttggcctctgactttcagtgatgaaantgcaaccatgcagtcccccctttgcagaagggcagttcttcccaggctttctggaagcaggggcttccgaggagtctccacccacctcacaggaacactcactntgngccctgcacaggacagcaggtttcacantctccantagggttgggcaggggcagcccttaaaacttggaagagggtcgntggaaggtgctgcgggaggacacagggcgtggaagcaggctnttcggggtcgggccgccgtgcaggggggtntccctgaggtcctttcccaaanggggantgctngccggtgcccgac

SEQ ID NO: 561 - DNA, 470 bp, Homosapiens
  misc_feature: n=a,t,g or c
caggtntatnttntttaattatcactcacatatttcacaggaaaaggantntagcaaatgggtcaaggtggtntaaaaaaaaaatccaggtttntacatgtctctctgtttacatctgggagaaaggttntcctggcatcagtcgcagcagctgcacttctctgacgcccctttgcaaacacagccctgggcacacttgctacagcccacggggaggcaggagcagcagctnttnttgcaggagggtgcatttgcnctctttgcacttgcagggaaccagcgcagggtgcagggagacaccagcgggcgcagggagcagttggggggncccattgcaagcccgagggagagactgggacttttcccaaggagagaagcgaaggaagccagtggggggcagctcgtgcccganttccttcagccccggggggntccccctagttctaggagcggnccccaccgggtgggat

SEQ ID NO: 562 - DNA, 395 bp, Homosapiens
atgaagggcatttaatgtcagagagaaaccgtacacctggggcagagatgatgagcacgccgggcccgccagcctgacccgttgcagcgtcctgtggtttgtgaggcctccctcggtggaggagtgacagcagcagctcaagcttcccctccccgggggtgggggaagacagtataacgtccacgcagcctggtcatgcaccctggcttctgcagcccaggcgcaaacattcagtttagggctttcctgacatgtcaggtcaaatggccccctttcctcttcaggtaggagctagtgaaccgtggaggatgaagaattctcgctggaaaggcaggcctgaagtccgggaggtgcagatctctctgtggtcactgggccagagatgaccttggact

SEQ ID NO: 563 - DNA, 368 bp, Homosapiens
tttttttttttttttttcaaggggattttaatgaaattttattaaggagatgagaagcagggagtctgtgttgaaaattcaataaagggcttgttttccatctcagcctggataatctatgttatctctgagtaaagggggtaacaattctaacaacctggcttccttagaagtttccattctcatatagtcaccgaaggcagcagcactcaggcgtttgctgccgtgcctgccctttggtttctgggacggctcgggtcccgtagcgccggcacagctgagattgccaagccgggaagagaccttgctccaggtgtagctgcgttttccccagatcacctgtccttttcccctccgacaaggaagct

SEQ ID NO: 564 - DNA, 237 bp, Homosapiens
atgtctttacagctttaatctagcaggccagagatgtggccagtggggcagccagagaggagggctactgccagctgctgacggaacctcctccctccccccaccccagcccagaggggacaaacagtagggccccagccttcctggctggcatcttgggagcagagggactatttgaaaacaggcactgtgacccaggctgtcatctccctcccttgcccccagtaaaaatagccc

SEQ ID NO: 565 - DNA, 307 bp, Homosapiens
aaagtttatagaaathmtttattatwagacaaaaatagactctcththhhcccctattcatgtgatcctactctgaatctctgctcagaggaggcagtgactcgctccccacccctctcccatccctgccgtgctggcacctgcagctgggtggaactggcaggggctgatcccctggagggctgacgttctcctgcaggtggggctgcctgayctccttcggggctcaactgctgatgcctcctcacccctcacacacccacctctgacatctgctcacatgcaaggtcatcttgtgggsctgtcc

SEQ ID NO: 566 - DNA, 3130 bp, Homosapiens
cagaatccaggggacggttgctgagcgggcctgggacagcgggtcgcggcacctccggcctgcgcgtgtctaatccgtctgtcgggtcccgaaagacctaagccgagcctgcgccggacgggtgggactggactgagagaattctctgagctggtgacaggtgccacaggcactggggatctcaccagaaaggaaccgacggagctaggggccagcgagatggcggacgaggccttagctgggctggatgagggagcccttcggaagctgctggaggtcacagcagatctggcagagcggcggcgcatccgctcagccatccgggaactgcagcggcaggagctggagcgcgaggaggaggccctggcatccaagcgtttccgtgccgagcggcaggacaacaaggagaactggctgcactctcagcagcgggaagctgagcagcgggctgccctggcacggctggcagggcagctggagtccatgaacgatgtggaggaattgactgcactgttgcgaagcgctggtgagtatgaggagcgcaagctgatccgagctgccatccgccgtgtacgggctcaggagattgaggctgccaccttggctgggaggttgtacagcgggcgtcccaacagtggctcaagagaggacagcaaggggctagcggcacacaggctggaacagtgtgaggtgccagagcgagaggaacaggaacagcaggcagaggtttcaaagccaacccccacccctgaaggcaccagccaggatgtgaccacagtgacactcctgctgcgagccccacctgggagcacatccagctcacctgcctcacccagcagttcacccacccctgcctctcctgagcctccattggagcctgccgaggcccagtgccttacagctgaggttccaggcagcccagagccaccccccagcccacccaagaccaccagccctgagcctcaggagtctccaacgctccccagcactgagggccaggtggtcaacaagcttctgtctggccccaaagagacccctgctgcccagagcccccccagaggcccctctgacaccaagagagcagacgtggctggaccccgaccctgccaacgctccctgtcggtgctcagcccccgccaaccagcccagaaccgagagtccaccccccttgccagcggaccttcctcattccagcgggctggctctgtgcgggatcgtgtccacaagttcacatctgattctcctatggctgctaggctccaggatggcacaccccaggctgccctaagtcccctgaccccccgcaaggctcctgggcccctccctcaccagcaccacccctgcgtcctcctccagcggctcctcctctcggggcccagtgatacctcctcccggttcagcaaggagcaacgaggagtagcccagcccctggcccagcttcgaagctgcccccaggaggagggccccagggggcggggcttggctgctaggccccttgaaaacagagcaggggggcctgtggcacgttcagaggagcctggtgccccgctgcccgtggccgtcggcactgccgagccaggggacagtatgaagaccacattcaccatcgagatcaaggacggccgtggccaggcctccacaggccgggtgctgctgcccacaggcaaccagagggcagaactgacactggggctgcgggcgcccccgaccctactcagcaccagtagtgggggcaagagcaccatcacccgtgtcaacagccctgggaccctggctcggctgggcagtgtcactcatgtcaccagcttcagccatgccccccccagtagccgaggaggctgcagcatcaagatggaagcagagccagcagagcctctcgctgcagcagtggaagcggccaatggggctgagcagacccgagtgaacaaagcaccagaagggcggagccctctgagcgctgaggagctgatgactattgaggatgaaggagtcttggacaagatgctggatcagagcacggactttgaagagcggaagctcatccgggctgcacttcgtgagctccgacaaaggaagagagaccagcgggacaaggagcgggaacggcggctgcaggaggcacggggccggccaggggaggggcgcggcaacacagccactgagaccaccacgaggcacagccagcgggcagctgatggctctgctgtcagcactgttaccaagactgagcggctcgtccactccaatgatggcacacggacggcccgcaccaccacagtggagtcgagtttcgtgaggcgctcggagaatggcagtggcagcaccatgatgcaaaccaagaccttctcctcttcctcctcatccaagaagatgggcagcatcttcgaccgcgaggaccaggcgagcccacgggccggcagcctggcggcgctcgagaaacggcaggccgagaagaagaaagagctgatgaaggcgcagagtctgcccaagacctcagcctcccaggcgcgcaaggccatgattgagaagctggagaaggagggcgcggccggcagccctggcggaccccgcgcagccgtgcagcgatccaccagcttcggggtccccaacgccaacagcatcaagcagatgctgctggactggtgtcgagccaagactcgcggctacgagcacgtcgacatccagaacttctcctccagctggagtgatgggatggccttctgtgccctggtgcacaacttcttccctgaggccttcgactatgggcagcttagccctcagaaccgacgccagaacttcgaggtggccttctcatctgcggagatgctggtggactgtgtgcccctggtggaggtggacgacatgatgatcatgggcaagaagcctgaccccaagtgtgtcttcacctatgtgcagtcgctgtacaaccacctgcgacgccacgaactgcgcctgcgcggcaagaatgtctagcctgcccgcccgcatggccagccagtggcaagctgccgcccccactctccgggcaccgtctcctgcctgtgcgtccgcccaccactgccctgtctgttgcgacaccctcccccccacatacacacgcagcgttttgataaattattggttttcaacg

SEQ ID NO: 567 - DNA, 409 bp, Homosapiens
ttttttttcagaactgcagagtaaatttattgggtggttgtcggttaaaatgacaaatgatgatctgaattcaatacattaaattgctgatagaattgcaaatttcaactgaatttacattgaggcctagcagtggtagttggctacaactggaacagtttatcacctcagggtatttgagggcaaggaagatacagaaaaaaaaaaattaggggtatgcaacacaatttaagtgctcagaaataaattttaccacagtgagaacgaaaccacaatgacatgttactaacactgtgcagacgtcatggttgaatgcctgcgttctgttccttcctggtggcagccgccttggttcattagttctcatgtttgcagctccttcacatgccccggagcttcccaagtgtgc

SEQ ID NO: 568 - DNA, 242 bp, Homosapiens
ggtgctggttaggttttattttaacaggatgttttctcttatttttcaaaatatcagttatatcaatattagaagtgtaaacaggtacaaaatatacagtacatagaaacaattttcttaactagtctatcgcctaataaaagtatgcatgagggggctgaatgaatgggcactgccaggtccctccgtctgcaggggaaacaagaggaccagtggctgcttcaacaaaacaggaatggata

SEQ ID NO: 569 - DNA, 11990 bp, Homosapiens
ctgcagatggatggtggggatagttgtacaacaatgtgaatgtacttgacgccactgaactgtatactaaaaaatggctcaaatggtgaattttattttatgtatattttatcacaatgtaaaagtgactcagctgtcaatgtactaaaatggaaccatctctaacgtgtatgtcattgaaaaaagattgattcagaagtagggggctcacataagaaaatgtggttgtgtgtacatgaatgtactctgaaggaaccagtaacaaccaaaacctggttgtctctgaagcagtgtttggggtggctgggtgtcaaagggggaaggagacttacttttcattttatgcctttttgcacatcttgaattttgtaccatatacactacccatccaaatcccttgtcggtatttttagtgtgtcccatccgagtggtcctctcggaggctgaactctccctccagcggtgctgcccagctcacagcatgttttggagtgctcctctttcacctgccttccaagcctcgggtgtgatttgcagccctccatggtagcaaatcctcaggggcgaactgaattttgaaaacctcccaagtggttcgggccaagtctggtggttgttgattttgactagagattagatggcatgatatttgtcttctgcctcttttcaccaaggaactgaggacttgggctggtccaaaggccatttccttatgtggtctggagactattcacagagaagagctccagaaatgttgtcccagtagcatcatagaaataggtgtagagtccccttcaggaagattaatctggttctttgggctgtaagtgatcaaagcaataccaaatgccttaaattaaaaaaaaaaaaaaaaaaaaacggaaagtttgttgccaaggccaggaaggacagtgtgggagctcaactcacaaagttgagggaagcactgcaggaaccaaggggctggcctgctcctcctctccagcctcctctgcttcttacatattgacctctctttcttcctactcccccagggggcaggaaacatggcttccacaggttccagttgaagaatcccagttccgtctataaattccagggaaggtctctgattggccctactcattcccaggcccattccttgacccagtcactgaagtcagggagatgcagtaataagactggctggaatcagggtctttaggggtggagggatggggaggaggcacagcatgtcatcaaaataaggaaattgcaaaagaaagcttgcaggctactttgaatgacaatgagaaagacggtgctgcctgagtgtgttaaggatccacatggtctccaaaatcctccaggagcatacagtctagtctgggagatgagacacaaaaataaccagaacacaacagcttgcactgactcgagggctggataagaatatctggaactcccccatctatttcagaagcttgtctcttggatgaaaattagacacttaatgggaaagggctttgaaaagagtgcagtaacaaagccccctttacaatttacccggcacattcacacccatcctgaggccaaagccacaggctgtgaggtctcactgtctcagcttcctgagctataaaatgggaatgatgctagtctctacctcctagggttggagaattgggggtcatgggtgtgaagtgctcagcagcttggcccacactaggtggtcagtacatgtaaggtattattgttgctacatacattagtagggcctgggcctctttaaacctttatagggtagcatggcaaggctaaccatcctcactttatatctgacaagctggggctcagagaggacgtgcctgagctggggctcagacaaggacacacctactagtaacccctccagctggtgatggcaggtctagggtaggaccagtgactggctcctaatcgagcactctattttcaggtttgcattgcaaaagggtcagtccaagagggacctggagagccaagtggaggtgtagagcacggccagtacccatggagaatggtggatgtccttaggggttagcaagtgccgtgtgctaaggagggggctttggaggttggcaggccctctgtggggctccatttttgtgggggtgggggctggagcattatagggggtgggaagtgattggggctgtcaccctagccttccttatctgacgcccacccatgcctcctcaggtacccccctgcccccacagctcctctcctgtgccttgtttcccagccatgcgttctcctctataaatacccgctctggtatttggggttggcagctgttgctgccagggagatggttgggttgacatgcggctcctgacaaaacacaaacccctggtgtgtgtgggcgtgggtggtgtgagtagggggatgaatcagggagggggcgggggacccagggggcaggagccacacaaagtctgtgcgggggtgggagcgcacatagcaattggaaactgaaagcttatcagaccctttctggaaatcagcccactgtttataaacttgaggccccaccctcgacagtaccggggaggaagagggcctgcactagtccagagggaaactgaggctcagggccagctcgcccatagacatacatggcagctttggccaggatccctccgcctgccaggctctccctgccctcccttcctgcctagagacccccaccctcaagcctggctggtctttgcctgagacccaaacctcttcgacttcaagagaatatttaggaacaaggtggtttagggcctttcctgggaacaggccttgaccctttaagaaatgacccaaagtctctccttgaccaaaaaggggaccctcaaactaaagggaagcctctcttctgctgtctcccctgaccccactcccccccaccccaggacgaggagataaccagggctgaaagaggccgctgggggctgcagacatgcttgctgcctgccctggcgaaggattggtaggcttgccgtcacaggacccccgctggctgactcaggggcgcaggctcttgcgggggagctggcctcccgcccccacggccacgggccctttcctggcaggacagcgggatcttgcagctgtcaggggaggggaggcgggggctgatgtcaggagggatacaaatagtgccgacggctgggggccctgtctcccctcgccgcatccactctccggccggccgcctgcccgccgcctcctccgtgcgcccgccagcctcgcccgcgccgtcaccatgagccaggcctactcgtccagccagcgcgtgtcctcctaccgccgcaccttcggcggcgccccggtcttctcgctcggctccccgctgagctcgcccgtgttcccgcgggcgcctttcggctctaagggctcctccagctcggtgacgtcccgcgtgtaccaggtgtcgcgcacgtcgggaggggccgggggcctggggtcgctgcgggccagccggctggggaccacccgcacgccctcctcctacggcgcaggcgagctgctggacttctcactggccgacgcggtgaaccaggagtttctgaccacgcgcaccaacgagaaggtggagctgcaggagctcaatgaccgttcgccaatctacatggagaaggtgcgcttcctggagcagcagaacgcgctcgccgccgaagtgaaccggctcaagggccgcgagccgacgcgagtggccgagctctacgaggaggagctgcgggagctgcggcgccaggtggaggtgctcactaaccagcgcgcgcgcgtcgacgtcgagcgcgacaacctgctcgacgacctgcagcggctcaaggccaagtgagggcccggcaccccagactcctctttctgcgggcagggcacaggaggctaggcctgggggctggggtcccgctgtcaccacctgccttctcccggggcccgaccgctcctcccccatgtggagaaagggtcctccacctgtgtgtttcaaggggccgtgacctccaggtctctccccctgcgatcccatcttgccacaggagttttcttggggacatagatcagggggtggatatgggagaatttaggggacccggtgccctgtggacagccccgttaaaaagcattttaagatgctggggcgatatttatggggtcaggtagttgatgggcagaggaagggctgcaggaggcccagagcgagtgtagccagagggagaagggaggctgataggagacagggaaagcagggcaagggccagagtccaagcaacagctctcagtctcagcgttgatgaggccctgggggaggtggggggaggggggagcttggccctggggcttgccgagactgtgtctttttacaaggtgaatggacaggctggagaaaaagggagtaggtgggggtcacagctctcagagagcttgggaggacctgactgtagacttcaccaggctccaagaacgaaaagggcagcaagtgtagcatatttcgctctggtcccacttctgacaggccaagtgagcacagtcaccctcctgccaccaaagtcataaatattaattgagcagctatatggccaggctggagctgggaaccagaaacacagaggtggataaaatagacacagtttctagagacccagggaggtcacacagtctggtggggacatagacttcaagggtgtggctcctgggcagagattgggccacttcctctgccctctctgggtgggtggggcctctccactccctgtctctcctgcctctacccagcagccaggccctccccctctgtcctggacccaccccctggtcagccccgccagtcgtttccactgccagctttatcacccgcaactgtctgtctttctgtctgtcccacccaggctgcaggaggagattcagttgaaggaagaagcagagaacaatttggctgccttccgagcggtgagtgcccttcttttccccttgcatggcctctcgcgtttgctctgccccacctgggtcgcggagaccatgtccttctcgcttggcctctcccaggacgtggatgcagctactctagctcgcattgacctggagcgcagaattgaatctctcaacgaggagatcgcgttccttaagaaagtgcatgaagaggtatacttggcccctcttcctggggtcactgggccattggggaaagcagccggaaagtggggtttggggtgaggctctggctgggaataggggtgtgagggtcgtgtgtgggccctgagagggactgaagcccagtcatgccctacaggagatccgtgagttgcaggctcagcttcaggaacagcaggtccaggtggagatggacatgtctaagccagacctcactgccgccctcagggatatccgggctcagtatgagaccatcgcggctaagaacatttctgaagctgaggagtggtacaagtcgaaggtgggtggcctcgcccggggactgggatctccgtccccctggaatcccaaggcctttggattgttgcttgcctgtggtaccatccatgggaggagagcccagaggttcatgctcccaagctcatccctacccgtgccctgcatccttctcatttttgggcccctttctctgcccttaggtgtcagacctgacccaggcagccaacaagaacaacgacgccctgcgccaggccaagcaggagatgatggaataccgacaccagatccagtcctacacctgcgagattgacgccctcaagggcactgtgagtccctgcccacctgggccaggccctgccccttctctgtctgcagttcacaccctcactttgtgaccttggccatcatagatcctctctggccttcatctacttaaatctacaatagggtaaaaccagacaagtggattccagttggatgctaaggaatcaggggttcctgggcatctacctatgtggggacttgtgaggctgatgcaatgttcctttgtatctattttattctgagtgttccacatatagcttaatttgagttcagggttcaacatggccaggacctgaccattctggggttgcctgccagccccaaagctttctttgggctgctagtgtcctcttcccttccttgacctgggttccccctctcctgcagaacgattccctgatgaggcagatgcgggaattggaggaccgatttgccagtgaggccagtggctaccaggacaacattgcacgcctggaggaggaaatccggcacctcaaggatgagatggcccgccatctgcgcgagtaccaggacctgctcaacgtgaagatggccctggatgtggagattgccacctaccggaagctgctggagggagaggagagccggtgaggggccaggcaggagccgagtgggaggtgcggggtgctgggtggtccatttctgtccccaggaggctcgagattactgattacctcaacaagacctggaaacaattttttttttttttgagatggagtttcgctcttgtcgcccagtctggagtgcaatggcaccatcttggctcactgcaacctccgcctcctgggttcaagcaattctcctgcctcagcttcccgagcagctgggattacaggcgcctaccaccacacctggctaatttttgtatttttagtagagaggggtttcactatgttgggcagctggtctcgaactcctgacctcaggtgatctgcctacctcagcctccaaagtactgggattacaggcgtgcgccgcgcccggcgtggaaacaattttatacaagaggccactgctctataaccgcagagaattaaccaaggccacctgggtaaaaagcaatttaattaacagcatttataaaaagagaaatataagtattcccttatccaccttcagaattaagaaccagcagcaaaaaaaaccatattcagcaaccaataataaaatattactgccagtcaagggagagatgaaagcagaatggggagtatgaggagggaaacggagggagcagatagaggcaaatagagagagggagggagagaccttcacagggataggctaagagaaggtaaagagatgcatacagaaggcatgagtttgcacacacatgcacacatgtcagcatatcacatgtcggaggaaaagacacagacgatatgctcagagcaacccactctagacacagaaacacatacactggaagggacaccagggaactgtcggatacagaatgtctatatcttttttttttttttttgagcagagtctgctctgtacagccgctaggtagcgtgtgtatctccctacactgcaacctgctcctcccaggctcaagcgctctcctgtctcagcctccctgtagctggatacaggatcgacagtgccaacacactcagactcgattttttgtatttttagtagagatgaggtttcaccatgttggtcaggctggactctaactcctgacctcaagtaattcgcctgcctcagcctcccaaagtgctgggattataggcatgagccactgtgcctggcctagaaatgttctatatcttgatttggactggtagttacacagacgtggacattgatcaaaactcattgaattgtacattaaagatctgtgcatttcactgtatgtaaatttaacctcaatttaaaacagatcagttactccaaaaactggtaccccttgatactcataaaaataactatctgaaatttttaaaaaggagcagacatgtttagatacaggtacaaacataaagagaaacttcagattttgtaaaatcacgtctacatatgatggcctttgaaggtagctaaaggcatgttgcattttcccagcattaggcctaaatagtaagctctcagaactggctggctggagggtgggcatgagcaatggatatcacccacagctgctactagtaccaacttcagtgccaggagcaagaaggaaatcctggtgctcttgagggtgcggtggggttgcacatccttagtgtcgcgcaacgcagttcacagttgaaataatgatccttccagaagagactatccctggggacagctctagctggcttcgaccccattccttagcagtatgggtggtgggagtgctggggtcgtgggactgggacagctgaggatggtgtttagaaaggaccaggtgagccttgatgggcgtgcagggaaagatcgggaggtctttttttttttttttagacagggcttgttctgtaccccaggctggagtgcagtggtgcaactccgctcactgcaagctccacctcctgggttcgcaccattctcctgcctcaccctcctgagtatctggaactacaggtgcccgccaccatgcccggctaatttttgtatttttagtagagacggggtttcactgtgttagccaggatggtctcgatctcctgacctggtgatccgcccgcctcggccttccaaagtgctgggattacagctgggcccggccgatgggagggttcttaactcttaggaggttttgtctcttcccttttaggatcaatctccccatccagacctactctgccctcaacttccgaggtgagtgtctgctggaggcggaggctggagttgcaggggccaggagtccagcatgggcactgcccaaggccagccaggagggaggatgggaccctggggctagggacagacctgagctagggaagaaaagggaccactgcgggtaggtcggggagtttaggtagaggtggatgaggcaacttatgacagagagagctttttatgtgattatattgtattgtatttaccatgtcccctgcaccttcttggagtattgggcctcagaagcagcctctgttctgaatcccaaactcatcccaaactctgaaagcaggagtgtccttggggccctggcttcaggagcatctcataccacctgccctctaagacacccacagcccattgtctgtttggcacattgccaagccccaccttggctgcttgtcgaacacctccagtttgttggagcaagatgttggatgcacgtttggaaaaaaatgccaaatcttagcaaagccaaacaatgaaaagaaagagctcttagggcactctgccattttgacattagtaatacgcagatcgggtggctttccaaccccagagagcagagaaacacaggataatgatgcattaggaaagcaagtcggagtccttggcagcttctcctttcctagatcaaaccttttctatcttcgatgtacatttccatcaggaaaaaaaacgcgctgcgtccagcgagtcacaacattcatcacaggctggttgctagctaaggaaattcgtaagcaccaaactcataataccaaggacctccatttgacctttcctacacaactcagagcctctcttttcagttagttgtttatacagacaccaagtatgagtcttgcatttaaaacttcatagtacaaaaaactccacccacattgcacagtgcttttccaaatcaatagctttgtggccatgataaggttggtaccacttcactccgtgtcctcagtgaggaaactgaggcacagaatggcaagtgactgagcatcagcacaatgagtcagtgccttattcctgctctgtctcacttaagacatcaagttgctcatctgaattttttttttcttttgaaacggagtctcgctctgtcgcccaggctggagtgcagtggtgcaatctcggctcaccgcaacctccgtcctcccaggttcaagcaattctcctgcctcagcctcctgagtagctgggattacaggcatgtgcaccagtccccctaattttgtatttttagtagagacgggttcacatgttggtcagggtggtctggaactcctggtactcatgatccactgccttggtccaaactactggcattacagatgtgaccaaccgcacctggccctgaaatcttaaagggagataggtactgtaaggtcctctaaagagtgtcttgagactgggctttggggttctatcttgaagaaggggagtcccaggagacaaatgtgtgcagggctctcctggggcctgggggtggagaggaactaggagggatggggaatgtcagtgctgtgcagcctgggcctcaggtgtcccctaccctcctgcaccatcctgcacatggagcaaatctgttggctcctgagaccatctaaactatgggacaggcgctgggggctgcagctgggtgctgggctgaaggaaaggtgttaaagtcttgaagaagtaacaagcctgtcttgagggggttggggtctgctagggctctgccaatgtggccccagatggactcccagcccctggtatagcccagcctggacttggtcaggctgagtgtgcgatggaccctgttacagaaaccagccctgagcaaaggggttctgaggtccataccaagaagacggtgatgatcaagaccatcgagacacgggatggggaggtaagtggtctgtctgggctccttacccttggttggggctatggatgtgtctggggggactgtcttccaccagctgtgcaggtctaggtcctggctagtgggcaagagagatcctgcgatcctgggtgggatgcctaggctgacgtcatcctgctagcacatgtgactggactcctctccccaggtcgtcagtgaggccacacagcagcagcatgaagtgctctaaagacgagagaccctctgccaccagagaccgtcctcacccctgtcctcactgctccctgaagcccagccttcttccgatcccaggacaccacacccagcctcagtcctccaaatcacagcctctgacccctcctcactggccatccctcgtggtccccaacagcgacatagcccatccctgcctggtcacaggcatgccccggccacctctgcggaccccagctgtgagccttggctgttggcagtgagtgagcctggctcttgtgctggatggagcccaggcgggagcggtggccctgtccctcccacctctgtgacctcaggcctacgctttggctctggagatagccccagagcagggtgttgggatactgcagggccaggactgagccccgcagacctccccagcccctagcccaggagagagaaagccaggcaggtagcctgggggactagccctgtggagactggggggcttgaaattgtccccgtggtctcttactttcctttccccagcccagggtggacttagaaagcaggggctacaagagggaatccccgaaggtgctggaggtgggagcaggagattgagaaggagagaaagtgggtgagatgctggagaagagaggagaggagagaggcagagagcggtctcaggctggtgggaggggcgcccacctccccacgccctccccccccctgctgcaggggctctggagagaaacaataaagagattcacacacaagccaagctggcccctgttgtcttgactgccaggtctcctgtgggtcccctggccggtgtgatacaacctgtcaccctgagatggactatactgaccttctacccagccagacttttcccagggcctcgcgccacttctgttcccagagccacctggccttgatgtctgtatgcagtgtatgggggtggaggggctggacagggcttttgttggggaaccacaaatacctctgcttaggccccagttccaggactgcaccccttgtgctctctactacaccttcaggtcagccaggctgggggacaccacctgctattccttttgaaggatgtacctgctccccactgactggctctgaagtagggctcccccagtcccttcttcaaagatgccaagagcccctttttttctctctctctttttttctttttgagatggagtcttgctgtgtcacccaggctggagtgcagcagtgtgatcaccgcttactgcagcctggacttcctgagctc

SEQ ID NO: 570 - DNA, 418 bp, Homosapiens
  misc_feature: n=a,t,g or c
ttttttttttttgaagaaagaaatctttattaataatcttaataatactnttagtttgaatggtcacacccttggaagcatacagaatggtaagaaaggaagcccgggntcggctgcagtcctggggatctgagtgagtcggggggttgagctgctgcaaaaaaagggtccggaacagcagaggggacagggggctctttacagaggacaaagccggcnggngcgtggggctatntacaacgggantagaaaaggaganttccatttcaatagctgatgctgantagaaagtgaggtntatttttaaatttttgacacttcatnagacagtnggagccacgttngggagcctgtattttttgctncttccctacttcagtgctcccntgccntcgcccgggggnttcctccctngccc

SEQ ID NO: 571 - DNA, 1162 bp, Homosapiens
ccactccggagtcctctgcccgcttcccgacctcgagggtctcctctgacgcgcagcgtcgattccccttccctcctcggtcccctgccccgcccctctcactgcgcggagccggtcgccggggggccgcaggggaggaggcggagaggcggggccctcctccccaccctctcactgccaaggggttggacccggccgcggcggctataaaagggccggcgccctggtcgtgccgcagtgcctcccgccccgtcccggcctcgcgcacctgctcaggccatgatgagcttcggcggcgcggacgcgctgctgggcgccccgttcgcgccgctgcatggcggcggcagcctccactacgcgctagcccgaaagggtggcgcaggcgggacgcgctccgccgctggctcctccagcggcttccactcgtggacacggacgtccgtgagctccgtgtccgcctcgcccagccgcttccgtggcgcaggcgccgcctcaagcaccgactcgctggacacgctgagcaacgggccggagggctgcatggtggcggtggccacctcacgcagtgagaaggagcagctgcaggcgctgaacgaccgcttcgccgggtacatcgacaaggtgcggcagctggaggcgcacaaccgcagcctggagggcgaggctgcggcgctgcggcagcagcaggcgggccgctccgctatgggcgagctgtacgagcgcgaggtccgcgagatgcgcggcgcggtgctgcgcctgggcgcggcgcgcggtcagctacgcctggagcaggagcacctgctcgaggacatcgcgcacgtgcgccagcgcctagacgacgaggcccggcagcgagaggaggccgaggcggcggcccgcgcgctggcgcgcttcgcgcaggaggccgaggcggcgcgcgtggacctgcagaagaaggcgcaggcgctgcaggaggagtgcggctacctgcggcgccaccaccaggaagaggtgggcgagctgctcggccagatccagggctccggcgccgcgcaggcgcagatgcaggccgagacgcgcgacgccctgaagtgcgacgtgacgtcggcgctgcgcgagattcgcgcgcagcttgaaggccacgcggtgcagagcacgctgcagtccgaggagtggttccgag

SEQ ID NO: 572 - DNA, 328 bp, Homosapiens
ggttacaagattctttattttgtaaactatacataaacagtaaaaaagaaaatgcattatactttattacgtaaagtcaacattaaattttgtattgagtgtgtataaattaaatggaaataattaatcaattttgctttcaatgaattgtatactgggaaaccagtttacccactgttgaaattaaagataccaatacgtaacattcaacaggtttttccatttttattatgggcacaaaaccattggtatgatatagttaaaagtgatggtgtgccaaaatgtctacacaattaattaacatgctaacttaaatacagcggttaaa

SEQ ID NO: 573 - DNA, 233 bp, Homosapiens
  misc_feature: n=a,t,g or c
gagtgtggggtcagtttattgggcatgcgtcagtcagaggctgggctggccagggtcgggtagggcagcagtttgtctggaccccgagaaacccaactggaatccagggcctcatctgnttcaaagccaaagtcttcctcaaccttaatctgcaccggggccagctctggagtcagcgcatttcctgctcggcgtccatcccgtggnactcgccgcctcttccgcccacttgg

SEQ ID NO: 574 - DNA, 2709 bp, Homosapiens
gggtcctgtcccatccatcctgacctgttccatctcagccccaggactcagtactgcggttgccaacactgctgccaggcatgatggatgggccacgttccgatgtgggccgttggggtggcaaccccttgcagccccctaccacgccatctccagagccagagccagagccagacggacgctctcgcagaggaggaggccgttccttctgggctcgctgctgtggctgctgttcatgccgaaatgcggcagatgacgactggggacctgaaccctctgactccaggggtcgagggtccagctctggcactcgaagacctggctcccggggctcagactcccgccggcctgtatcccggggcagcggtgtcaatgcagctggagatggcaccatccgagagggcatgctagtagtgaacggtgtggacttgctgagctcgcgctcggaccagaaccgccgagagcaccacacagacgagtatgagtacgacgagctgatagtgcgccgcgggcagcctttccatatgctcctcctcctgtcccggacctatgaatcctctgatcgcatcacccttgagttactcatcggaaacaaccccgaggtgggcaagggcacgcacgtgatcatcccagtgggcaaggggggcagtggaggctggaaagcccaggtggtcaaggccagtgggcagaatctgaacctgcgggtccacacttcccccaacgccatcatcggcaagtttcagttcacagtccgcacacaatcagacgctggggagttccagttgccctttgacccccgcaatgagatctacatcctcttcaacccctggtgcccagaggacattgtgtacgtggaccatgaggattggcggcaggagtatgttcttaatgagtctgggagaatttactacgggaccgaagcacagattggtgagcggacctggaactacggccagtttgaccacggggtgctggatgcctgcttatacatcctggaccggcgggggatgccatatggaggccgtggagacccagtcaatgtctcccgggtcatctctgccatggtgaactccctggatgacaatggagtcctgattgggaactggtctggtgattactcccgaggcaccaacccatcagcgtgggtgggcagcgtggagatcctgcttagctacctacgcacgggatattccgtcccctatggccagtgctgggtctttgctggagtgaccaccacagtgctgcgctgcctgggtctggccacccgtactgtcaccaacttcaactccgcccacgacacagacacatcccttaccatggacatctacttcgacgagaacatgaagcccctggagcacctgaaccatgattctgtctggaacttccatgtgtggaacgactgctggatgaagaggccggatctgccctcgggctttgatgggtggcaggtggtggatgccacaccccaagagactagcagtggcatcttctgctgcggcccctgctctgtggagtccatcaagaatggcctggtctacatgaagtacgacacgcctttcatttttgctgaggtgaatagtgacaaggtgtactggcagcggcaggatgatggcagcttcaagattgtttatgtggaggagaaggccatcggcacactcattgtcacaaaggccatcagctccaacatgcgggaggacatcacctacctctataagcacccagaaggctcagacgcagagcggaaggcagtagagacagcagcagcccacggcagcaaacccaatgtgtatgccaaccggggctcagcggaggatgtggccatgcaggtggaggcacaggacgcggtgatggggcaggatctgatggtctctgtgatgctgatcaatcacagcagcagccgccgcacagtgaaactgcacctctacctctcagtcactttctatactggtgtcagtggtaccatcttcaaggagaccaagaaggaagtggagctggcaccaggggcctcggaccgtgtgaccatgccagtggcctacaaggaataccggccccatcttgtggaccagggggccatgctgctcaatgtctcaggccacgtcaaggagagcgggcaggtgctggccaagcagcacaccttccgtctgcgcaccccagacctctccctcacgttactgggagcagcagtggttggccaggagtgtgaagtacagattgtcttcaagaacccccttcccgtcaccctcaccaatgtcgtcttccggctcgaaggctctgggttacagaggcccaagatcctcaacgttggggacattggaggcaatgaaacagtgacactgcgccagtcgtttgtgcctgtgcgaccaggcccccgccagctcattgccagcttggacagcccacagctctcccaggtgcacggtgtcatccaggtggatgtggccccagcccctggggatgggggcttcttctcagacgctggaggtgacagtcacttaggagagaccatccctatggcatctcgaggtggagcttagccctgtgccaggagcaatgggactggagtcagatgagcaaggacattgccccaagataggggcacactacagagcagctccccaggagctcaggtggggagtccagggctcccggagagggagtcagtcttcacttgcactgggggaacagatgctaataaactgttttttaatg

SEQ ID NO: 575 - DNA, 2529 bp, Homosapiens
gcatcctttttgggctgctcacagcccccagcctctatggtgaagacatacttgctagcagcgtcaccaacttgctgccaagagatcagtgctgcaaggcaaggttatttctaactgagcagagcctgccaggaagaaagcgtttgcaccccacaccactgtgcaggtgtgaccggtgagctcacagctgccccccaggcatgcccagcccacttaatcattcacagctcgacagctctctcgcccagcccagttctggaagggataaaaagggggcatcaccgttcctgggtaacagagccaccttctgcgtcctgctgagctctgttctctccagcacctcccaacccactagtgcctggttctcttgctccaccaggaacaagccaccatgtctcgccagtcaagtgtgtccttccggagcgggggcagtcgtagcttcagcaccgcctctgccatcaccccgtctgtctcccgcaccagcttcacctccgtgtcccggtccgggggtggcggtggtggtggcttcggcagggtcagccttgcgggtgcttgtggagtgggtggctatggcagccggagcctctacaacctggggggctccaagaggatatccatcagcactagaggaggcagcttcaggaaccggtttggtgctggtgctggaggcggctatggctttggaggtggtgccggtagtggatttggtttcggcggtggagctggtggtggctttgggctcggtggcggagctggctttggaggtggcttcggtggccctggctttcctgtctgccctcctggaggtatccaagaggtcactgtcaaccagagtctcctgactcccctcaacctgcaaatcgaccccagcatccagagggtgaggaccgaggagcgcgagcagatcaagaccctcaacaataagtttgcctccttcatcgacaaggtgcggttcctggagcagcagaacaaggttctggacaccaagtggaccctgctgcaggagcagggcaccaagactgtgaggcagaacctggagccgttgttcgagcagtacatcaacaacctcaggaggcagctggacagcatcgtgggggaacggggccgcctggactcagagctgagaaacatgcaggacctggtggaagacttcaagaacaagtatgaggatgaaatcaacaagcgtaccactgctgagaatgagtttgtgatgctgaagaaggatgtagatgctgcctacatgaacaaggtggagctggaggccaaggttgatgcactgatggatgagattaacttcatgaagatgttctttgatgcggagctgtcccagatgcagacgcatgtctctgacacctcagtggtcctctccatggacaacaaccgcaacctggacctggatagcatcatcgctgaggtcaaggcccagtatgaggagattgccaaccgcagccggacagaagccgagtcctggtatcagaccaagtatgaggagctgcagcagacagctggccggcatggcgatgacctccgcaacaccaagcatgagatcacagagatgaaccggatgatccagaggctgagagccgagattgacaatgtcaagaaacagtgcgccaatctgcagaacgccattgcggatgccgagcagcgtggggagctggccctcaaggatgccaggaacaagctggccgagctggaggaggccctgcagaaggccaagcaggacatggcccggctgctgcgtgagtaccaggagctcatgaacaccaagctggccctggacgtggagatcgccacttaccgcaagctgctggagggcgaggaatgcagactcagtggagaaggagttggaccagtcaacatctctgttgtcacaagcagtgtttcctctggatatggcagtggcagtggctatggcggtggcctcggtggaggtcttggcggcggcctcggtggaggtcttgccggaggtagcagtggaagctactactccagcagcagtgggggtgtcggcctaggtggtgggctcagtgtggggggctctggcttcagtgcaagcagtggccgagggctgggggtgggctttggcagtggcgggggtagcagctccagcgtcaaatttgtctccaccacctcctcctcccggaagagcttcaagagctaagaacctgctgcaagtcactgccttccaagtgcagcaacccagcccatggagattgcctcttctaggcagttgctcaagccatgttttatccttttctggagagtagtctagaccaagccaattgcagaaccacattctttggttcccaggagagccccattcccagcccctggtctcccgtgccgcagttctatattctgcttcaaatcagccttcaggtttcccacagcatggcccctgctgacacgagaacccaaagttttcccaaatctaaatcatcaaaacagaatccccaccccaatcccaaattttgttttggttctaactacctccagaatgtgttcaataaaatgcttttataatat

SEQ ID NO: 576 - DNA, 486 bp, Homosapiens
  misc_feature: n=a,t,g or c
ttccaagaagaacatttttctgtttattcttagaatgtgaattttttttttcaactcagggccaagtacaaacttttgatttttgaaattttttcaactcagggccaagtacaatcttttgatttaaaaattttttttcatgaacaaaccatcagtagttattaaggagcccaagaaataggagatgtgaaagcaggatttctttgtgtttcctttgaatgttgttattttgagtattatcattatcaggtagaggaagaaaggtaggctgggaagtaggtccttatgatatcttgactatggatcccagatttacatttcacctngtcacagagcacacataatttaagataaacatgtcaagaatgacataaaccagaggtaaacaccaaggagctttacatttggaaccngaaaataaaaattagaaaaattattaccccatattaataaccaaaaaattacttaaactcctaggnccccngg

SEQ ID NO: 577 - DNA, 423 bp, Homosapiens
ttttttgaaattttagatttctttatgttttaacaaattaacaacaatgataagaggacattagcagcttttcttgggtctctttgttaacaataactcgatcctgcagccataacaggggatgtggccaagttttagctggcagaccagtaagccaatattttacacaatggatgacatttctgaaagcagaggcagagacagacccaaagtcacacatgtagtccaacaaacaagtttctgccatttttaattgtatttagagcaacaaaagattccaagattacaaaaagagaacagaacactagcgcttggagctggtcctgctgcccagtggaggccaagtgccaccgtgagaaataagccccatctaaagagatttcaagcaaaattgtttcttttaagaaaatctttgtgtgatgc

SEQ ID NO: 578 - DNA, 213 bp, Homosapiens
aggtctctgtgaggggaagcagcaggtgagggagaagggagacacaagggggagacgtggggaggcagggccaggggaaggtgacatatagacatggagtgggtcaaggaagacacatgcattcacggacctcagggccccttggcagggacaaacagatggactgactaggatgaggggaacaggacggacgtggatgcctcactcaaggcc

SEQ ID NO: 579 - DNA, 436 bp, Homosapiens
ttttccttgaataatcattttattaacaaatacaaacttgaaatgttggtgataaaatatatcaatattgaacaaaaatgtgtgtaaacagtaattctacaactgggaacatatctcagttttgttaattttggtgacgtcttcccaaccatgtctaatcttcagtatcttcttcctcaagcatggcaggaatagtatgcttttaaatatcaggacaacaattggaaggaaaacagctatcataaaagttggaggtgtataccatacaaattgttttatatctatccacttattccaggcaaaaatcaatgcgtgtattgtgcccagtagaagggaaacaattcctagcttgctctgcaaaagaaaaacaaaattggtgaagattggttcaataagagtttatcccatcctacctcatctggatatgctctgttgc

SEQ ID NO: 580 - DNA, 337 bp, Homosapiens
  misc_feature: n=a,t,g or c
tatgaaaggtttattccnagngctagaccccaancttcttgggctctaagcacaattaaactgggngggngggngagggtaggcctattcagangcaaggccagcaatggggctccccattatccccacccctttggncccagtccccttntctgcaangggcacgcatagaggagagacaaagggtnttagacgcaacatcattggcccaggggagtccgagaagagctgccattggctgacagggcattttcaggctctgtcattggtcagggagcacaccccagcctgaagngtgatgccattggccaggggagtggttttgtcanagccgttg

SEQ ID NO: 581 - DNA, 254 bp, Homosapiens
  misc_feature: n=a,t,g or c
ttttttttttttttttttttttttttttttttattgccaaganccaaagaaaaaattttatttacaatagagaattttatttgaaacatgcatttcttgtttttttaaaaacaaatcagcaaatgcagatcaagtttacactccttaaggcaagagtccctatgcacgctgtacatgttcatattaaatccaaaagctgctcacccggggaacttgtgtacaaagggcaaggccaaggtcagcaatgtgtcttt

SEQ ID NO: 582 - DNA, 286 bp, Homosapiens
  misc_feature: n=a,t,g or c
gctctnagttanantctttattgactttagccaaggnagngccctgagatgggggtccagagagagaggcttggtggggctacgtcctgggggccaggttggttctgaggggtagaaggccatccacccattcgcacggctgctccaggagggcttgccacagctgcttctcctcaggtgtggaatccatccagggcacctgcagcccatagctgctgcctgggatntgggtnggcagggtttnagggcatgatcacactggacaccttggggcccccaaacacct

SEQ ID NO: 583 - DNA, 319 bp, Homosapiens
tttagcggtctgccttcatcttttaatggccggtgcggtacagttagtggacagacgggggatgggacacagcaggggtgaaacagggcagtcacagccggggccggggatctggaagcggggggggtcctccccctggaaacaccgtctctggaaggacacccttaggatcccctgacctcagggtgccacccacacgggcctggtgttctgggagggccgggctggagtgaccccagcccctccctacgttccagggacccttgggtctgtcgagtccccttggtggatgagggtcaagacctaggtcaagctgact

SEQ ID NO: 584 - DNA, 205 bp, Homosapiens
caggagaagcctgtttattaggcaggagaagcagcagggcagccaggctcccctcccagccaccagctggccaaatgtcctcccttaactcaggggtacccaaggctccatggccatgtgaccagaggcgtgtaccctcaagaggcggcccctcagccctgggcagcccagccactgggtctcgcccttcaggggcctgcgcccc

SEQ ID NO: 585 - DNA, 380 bp, Homosapiens
  misc_feature: n=a,t,g or c
ggcttttggccangcttctttacagcatcctgcactccagcctgggtgacacagtgagactccgtctccaaaaaaaaggatgaggaatagaattctgtgcagatgtcctgacttggcaattttgtgtccctgcctcactgtctccaccaacccccgcctgtcctagtgttgttctgcctcctgtcctctcttgctctcttgtcagtctctggcttcctcggccccatttcacttcactgagtcctgacacccatctccctaggggcctgtgagaggagagggaagggtctgttctgctcagctccatgtcccccattttcctccacaataaaactggggactgggctgaaaaaaaaaaaaaaaaaaaaaaaaaaaaaaaa

SEQ ID NO: 586 - DNA, 279 bp, Homosapiens
  misc_feature: n=a,t,g or c
gtgattcaaggttatagctttactgcaactcaggacagtgagcccaagccaggtgttggctggcgccagaacaaggctcaaatgcggacttggacacacttcgaaggagggctgctctgccctgctgttcgggcgtggggggtggggggcgggggcactgagctgggcattctgtcctcctccctggatgtgcagacatgggccatggttnctgacgnacttcacatgtgaacctgggccttctgtcctcctccctggatgtgcagacatgggaccatg

SEQ ID NO: 587 - DNA, 452 bp, Homosapiens
ttttttgagggcaggtaaatgtattcagagcacatggcgagtaagaggcaaatcttctgccagcaagtccaggatttttttcaccagaggacattgcttggtccccagggctcaggaccctgtgttttgtctcactcccacccacagagctcctgtatccaggcatcaactccaactcccactcctggaggccgaggcaggaggatcacttgagcccaggagttcgagaccagcctgggccacatagtgagaccttgtctccacacaaaaattttaaaaatagctgggcttggtggtggcatgtgcctgtagtcctagctactcgagaggctgacgttggaggatcactttgagcccaggaggtggaggctgcagtgagcagtcatcactgtactccagcctggtgacagagcgagaccctatcaccgccccccgccccaccaaaaaaaaat

SEQ ID NO: 588 - DNA, 206 bp, Homosapiens
  misc_feature: n=a,t,g or c
tttttttttttttttttttttttttttttgacacaaacccactttattcagcattgagccagcccacacgctgggaggtcaaactcacagacatcgcaccaagggccggggactcagaagggctgaaaggcttcatctnggaaatgggcaccgctcacaagcccggctatccccaaatctcaacaactgtctgcatctatgtcccc

SEQ ID NO: 589 - DNA, 224 bp, Homosapiens
attcaagatcaattttatttgttgtaaaaacaaacatgggttatgttccagacaaacagatataagtgagtagacttatgccctggtgcctccttggctcttcacaggatgcaaaaacaaatcctgccagcaggaggtggcagattgcagaggtggctggttgctctttcagccagcttggccttgtctggcatgcacaggtcccagcacagcaaaacattcag

SEQ ID NO: 590 - DNA, 424 bp, Homosapiens
  misc_feature: n=a,t,g or c
agagctctagcacatttattcgggagagtaagcctgggaaagactaagggagtggtggcagggagaaaggctgtggggaatcagagcgggtgctcagttgggtcttgaagganannnnnnngnnggtgggaggtgggttnccgaggatatcttggttgaagacttgggggtcaagacaaagggacttagggggatggggtctggttagagttggggagggggcctaggacatccgtgcagagtctggggaggttggggtgggagagtctgtacaagtttggtgttgggtgttctagttggcctggtgtccaagagttggggcagtccgaaaaagggttccagagtctggtgtggctggctggggtttcacggcanaaaatgggctggaaggggcagttgtaaactgtctggttgcaaggnaaag

SEQ ID NO: 591 - DNA, 204 bp, Homosapiens
  misc_feature: n=a,t,g or c
ttttttttattgacatttcaataaaaatttattgaaatttcagtgatgttttaaagagagggggaaaaatacagaaaaccaaagaactcatcaacaactataacacaaantntacctncatgattttgtcttnaaaccatctctcagcacctgacttttganctgtgaatatatctctataggcaggcaccanttcaaaacacc

SEQ ID NO: 592 - DNA, 551 bp, Homosapiens
accccatccgctggctctcacccctcggagacgctcgcccgacagcatagtacttgccgcccagccacgcccgcgcgccagccaccatgctaggtaacaagcgactggggctgtccggactgaccctcgccctgtccctgctcgtgtgcctgggtgcgctggccgaggcgtacccctccaagccggacaacccgggcgaggacgcaccagcggaggacatggccagatactactcggcgctgcgacactacatcaacctcatcaccaggcagagatatggaaaacgatccagcccagagacactgatttcagacctcttgatgagagaaagcacagaaaatgttcccagaactcggcttgaagaccctgcaatgtggtgatgggaaatgagacttgctctctggccttttcctattttcagcccatatttcatcgtgtaaaacgagaatccacccatcctaccaatgcatgcagccactgtgctgaattctgcaatgttttcctttgtcatcattgtatatatgtgtgtttaaataaagtatcatgcattc

SEQ ID NO: 593 - DNA, 501 bp, Homosapiens
  misc_feature: n=a,t,g or c
cactntttnnacgcttgctaagactttattaacgccccggaganggngnttanggaaagcaacaggagggagaccccgcgacgnaaagagtngctcagagctctgcagacacaaagatgaaaagcttggccacaaaggagctgacggtgccgtgggagagagatccatcttgacggtcaggagcaagtccctgggctcggggacaggcttggtgagggccaccaccccactntggggcntcaccttccgggtgggtgaaaaagccctcctcattgccgccggtgatggccagctgcatgctgtccccggggaaaacttngnagggggcccatgcgggaaaaccaccgcgggcgctttnggatgttgggtggggggaaagagaggtggtagttaggttatttcttcagaggcagcttttggagcacttcccgatttttcattgggcaaggcaagcgttcacagcgggttngctttcggngccgnggttagttttttcagggc

SEQ ID NO: 594 - DNA, 1195 bp, Homosapiens
cctggggacaatgtgggcttcaatgtcaagaatgttgcctgtcctgctgtctctgctgctgcttctgggtcctgctgtcccccaggagaaccaagatggtcgttactctctgacctatatctacactgggctgtccaagcatgttgaagacgtccccgcgtttcaggcccttggctcactcaatgacctccagttctttagatacaacagtaaagacaggaagtctcagcccatgggactctggagacaggtggaaggaatggaggattggaagcaggacagccaacttcagaaggccagggaggacatctttatggagaccctgaaagacattgtggagtattacaacgacagtaacgggtctcacgtattgcagggaaggtttggttgtgagatcgagaataacagaagcagcggagcattctggaaatattactatgatggaaaggactacattgaattcaacaaagaaatcccagcctgggtccccttcgacccagcagcccagataaccaagcagaagtgggaggcagaaccagtctacgtgcagcgggccaaggcttacctggaggaggagtgccctgcgactctgcggaaatacctgaaatacagcaaaaatatcctggaccggcaagatcctccctctgtggtggtcaccagccaccaggccccaggagaaaagaagaaactgaagtgcctggcctacgacttctacccagggaaaattgatgtgcactggactcgggccggcgaggtgcaggagcctgagttacggggagatgttcttcacaatggaaatggcacttaccagtcctgggtggtggtggcagtgcccccgcaggacacagccccctactcctgccacgtgcagcacagcagcctggcccagcccctcgtggtgccctgggaggccagctaggaagcaagggttggaggcaatgtgggatctcagacccagtagctgcccttcctgcctgatgtgggagctgaaccacagaaatcacagtcaatggatccacaaggcctgaggagcagtgtggggggacagacaggaggtggatttggagaccgaagactgggatgcctgtcttgagtagacttggacccaaaaaatcatctcaccttgagcccacccccaccccattgtctaatctgtagaagctaataaataatcatccctccttaaaaaaaaaaa

SEQ ID NO: 595 - DNA, 306 bp, Homosapiens
tttacaaacaaagtgtgggtatatttggcaggtttgaggcaagcagaaaggagggtttgggtactctataaaaaaagatctgaaattcaaacatctgataaggccacaatgaagagatttccagcagtgggtgttgcaggatgctggcacccaaatcgccgcacgttgcaaaggtgctatgcaaggtgaggaggcaggtgaggcaggcagtgctctcacaggtccatgtctgggcctcctgaggatgtcttcagcggcactgagtcaaatccatcaggagtcctcttggaggtaaatgatttgatc

SEQ ID NO: 596 - DNA, 230 bp, Homosapiens
ttttttttttttttttttttgcgacagcgcgactttatttggagttttccacctaagcagctcccagctgagctgcatgacatgtgcaaaagtcccctagaaagctgggcctcgcagtgtgtaaaaaaggccccccatgtgcagagccgtgcaaccattttaaaaaaagagacagtgagagagaaatcaggccccctgggagcctggcttgggtggagtgcacatcgctc

SEQ ID NO: 597 - DNA, 854 bp, Homosapiens
gaattcccaactctggagtcctctgagagagccaccaaggaggagcaggggagcgacggccggggcagaagttgagaccacccagcagaggagctaggccagtccatctgcatttgtcacccaagaactcttaccatgaagaccctcctactgttggcagtgatcatgatctttggcctactgcaggcccatgggaatttggtgaatttccacagaatgatcaagttgacgacaggaaaggaagccgcactcagttatggcttctacggctgccactgtggcgtgggtggcagaggatcccccaaggatgcaacggatcgctgctgtgtcactcatgactgttgctacaaacgtctggagaaacgtggatgtggcaccaaatttctgagctacaagtttagcaactcggggagcagaatcacctgtgcaaaacaggactcctgcagaagtcaactgtgtgagtgtgataaggctgctgccacctgttttgctagaaacaagacgacctacaataaaaagtaccagtactattccaataaacactgcagagggagcacccctcgttgctgagtcccctcttccctggaaaccttccacccagtgctgaatttccctctctcataccctccctccctaccctaaccaagttccttggccatgcagaaagcatccctcacccatcctagaggccaggcaggagcccttctatacccacccagaatgagacatccagcagatttccagccttctactgctctcctccacctcaactccgtgcttaaccaaagaagctgtactccggggggtctcttctgaataaagcaattagcaaatcaaaaaaaaaaaaggaattc

SEQ ID NO: 598 - DNA, 1729 bp, Homosapiens
aagtttcccttctcccagtccaagaccccaaatcaccacaaaggacccaatccccagactcaagatatggtctgggcgctgtcttgtgtctcctaccctgatccctgggttcaactctgctcccagagcatgaagcctctccaccagcaccagccaccaacctgcaaacctagggaagattgacagaattcccagcctttcccagctccccctgcccatgtcccaggactcccagccttggttctctgcccccgtgtcttttcaaacccacatcctaaatccatctcctatccgagtcccccagttcctcctgtcaaccctgattcccctgatctagcaccccctctgcaggtgctgcacccctcatcctgtctcggattgtgggaggctgggagtgcgagaagcattcccaaccctggcaggtgcttgtagcctctcgtggcagggcagtctgcggcggtgttctggtgcacccccagtgggtcctcacagctacccactgcatcaggaacaaaagcgtgatcttgctgggtcggcacagcctgtttcatcctgaagacacaggccaggtatttcaggtcagccacagcttcccacacccgctctacgatatgagcctcctgaagaatcgattcctcaggccaggtgatgactccagccacgacctcatgctgctccgcctgtcagagcctgccgagctcacggatgctatgaaggtcatggacctgcccacccaggagccagcactggggaccacctgctacgcctcaggctggggcagcattgaaccagaggagttcttgaccccaaagaaacttcagtgtgtggacctccatgttatttccaatgacgtgtgtgcgcaagttcaccctcagaaggtgaccaagttcatgctgtgtgctggacgctggacagggggcaaaagcacctgctcgggtgattctgggggcccacttgtctgtaatggtgtgcttcaaggtatcacgtcatggggcagtgaaccatgtgccctgcccgaaaggccttccctgtacaccaaggtggtgcattaccggaagtggatcaaggacaccatcgtggccaacccctgagcacccctatcaactccctattgtagtaaacttggaaccttggaaatgaccaggccaagactcaggcctccccagttctactgacctttgtccttaggtgtgaggtccagggttgctaggaaaagaaatcagcagacacaggtgtagaccagagtgtttcttaaatggtgtaattttgtcctctctgtgtcctggggaatactggccatgcctggagacatatcactcaatttctctgaggacacagataggatggggtgtctgtgttatttgtggggtacagagatgaaagaggggtgggatccacactgagagagtggagagtgacatgtgctggacactgtccatgaagcactgagcagaagctggaggcacaacgcaccagacactcacagcaaggatggagctgaaaacataacccactctgtcctggaggcactgggaagcctagagaaggctgtgaaccaaggagggagggtcttcctttggcatgggatggggatgaagtaaggagagggactgaccccctggaagctgattcactatggggggaggtgtattgaagtcctccagacaaccctcagatttgatgatttcctagtagaactcacagaaataaagagctgttatactgtgaa

SEQ ID NO: 599 - DNA, 360 bp, Homosapiens
tgcttatcacaatgaatgttctcctgggcagcgttgtgatctttgccaccttcgtgactttatgcaatgcatcatgctatttcatacctaatgagggagttccaggagattcaaccaggatgtttctacacctgtgggttatgacaaagacaactgccaaagaatcttcaagaaggaggactgcaagtatatcgtggtggagaagaaggacccaaaaaagacctgttctgtcagtgaatggataatctaatgtgcttctagtaggcacagggctcccaggccaggcctcattctccctggcctctaatagtcaatgattgtgtagccatgcctatcagtaaaaagatttttgagcaaaca

SEQ ID NO: 600 - DNA, 334 bp, Homosapiens
agttttgtctcaatgacagtgtttctacacctgtgggttatgacaaagacaactgccaaagaatcttcaagaaggaggactgcaagtatatcgtggtggagaagaaggacccaaaaaagacctgttctgtcagtgaatggataatctaatgtgcttctagtaggcacagggctcccaggccaggcctcattctcctctggcctctaatagtcaatgattgtgtagccatgcctatcagtaaaaagatttttgagcaaacacttgaatatgtagtgtcttttaatttataatttatgtatgcattgatttaatacacattataaagaatactttc

SEQ ID NO: 601 - DNA, 384 bp, Homo sapiens; identical to SEQ ID NO: 3

SEQ ID NO: 602 - DNA, 372 bp, Homo sapiens; identical to SEQ ID NO: 4

SEQ ID NO: 603 - DNA, 358 bp, Homo sapiens; identical to SEQ ID NO: 6
  misc_feature: n=a,t,g or c

SEQ ID NO: 604 - DNA, 363 bp, Homo sapiens; identical to SEQ ID NO: 7

SEQ ID NO: 605 - DNA, 355 bp, Homo sapiens; identical to SEQ ID NO: 10

SEQ ID NO: 606 - DNA, 308 bp, Homo sapiens; identical to SEQ ID NO: 11

SEQ ID NO: 607 - DNA, 425 bp, Homo sapiens; identical to SEQ ID NO: 17
  misc_feature: n=a,t,g or c

SEQ ID NO: 608 - DNA, 380 bp, Homo sapiens; identical to SEQ ID NO: 27

SEQ ID NO: 609 - DNA, 358 bp, Homo sapiens; identical to SEQ ID NO: 36

SEQ ID NO: 610 - DNA, 349 bp, Homo sapiens; identical to SEQ ID NO: 47

SEQ ID NO: 611 - DNA, 4029 bp, Homo sapiens; identical to SEQ ID NO: 53

SEQ ID NO: 612 - DNA, 329 bp, Homo sapiens; identical to SEQ ID NO: 54

SEQ ID NO: 613 - DNA, 987 bp, Homo sapiens; identical to SEQ ID NO: 60

SEQ ID NO: 614 - DNA, 414 bp, Homo sapiens; identical to SEQ ID NO: 63
  misc_feature: n=a,t,g or c

SEQ ID NO: 615 - DNA, 543 bp, Homo sapiens; identical to SEQ ID NO: 65

SEQ ID NO: 616 - DNA, 371 bp, Homo sapiens; identical to SEQ ID NO: 66

SEQ ID NO: 617 - DNA, 265 bp, Homo sapiens; identical to SEQ ID NO: 69

SEQ ID NO: 618 - DNA, 357 bp, Homo sapiens; identical to SEQ ID NO: 74

SEQ ID NO: 619 - DNA, 268 bp, Homo sapiens; identical to SEQ ID NO: 85

SEQ ID NO: 620 - DNA, 343 bp, Homo sapiens; identical to SEQ ID NO: 89

SEQ ID NO: 621 - DNA, 512 bp, Homo sapiens; identical to SEQ ID NO: 91

SEQ ID NO: 622 - DNA, 3530 bp, Homo sapiens; identical to SEQ ID NO: 93

SEQ ID NO: 623 - DNA, 485 bp, Homo sapiens; identical to SEQ ID NO: 94

SEQ ID NO: 624 - DNA, 934 bp, Homo sapiens; identical to SEQ ID NO: 98

SEQ ID NO: 625 - DNA, 538 bp, Homo sapiens; identical to SEQ ID NO: 99

SEQ ID NO: 626 - DNA, 507 bp, Homo sapiens; identical to SEQ ID NO: 107

SEQ ID NO: 627 - DNA, 414 bp, Homo sapiens; identical to SEQ ID NO: 109

SEQ ID NO: 628 - DNA, 488 bp, Homo sapiens; identical to SEQ ID NO: 111

SEQ ID NO: 629 - DNA, 510 bp, Homo sapiens; identical to SEQ ID NO: 115
  misc_feature: n=a,t,g or c

SEQ ID NO: 630 - DNA, 372 bp, Homo sapiens; identical to SEQ ID NO: 119

SEQ ID NO: 631 - DNA, 346 bp, Homo sapiens; identical to SEQ ID NO: 121
  misc_feature: n=a,t,g or c

SEQ ID NO: 632 - DNA, 497 bp, Homo sapiens; identical to SEQ ID NO: 124

SEQ ID NO: 633 - DNA, 744 bp, Homo sapiens; identical to SEQ ID NO: 126

SEQ ID NO: 634 - DNA, 1272 bp, Homo sapiens; identical to SEQ ID NO: 131

SEQ ID NO: 635 - DNA, 5985 bp, Homo sapiens; identical to SEQ ID NO: 141

SEQ ID NO: 636 - DNA, 476 bp, Homo sapiens; identical to SEQ ID NO: 149

SEQ ID NO: 637 - DNA, 698 bp, Homo sapiens; identical to SEQ ID NO: 155

SEQ ID NO: 638 - DNA, 292 bp, Homo sapiens; identical to SEQ ID NO: 164
  misc_feature: n=a,t,g or c

SEQ ID NO: 639 - DNA, 712 bp, Homo sapiens; identical to SEQ ID NO: 173

SEQ ID NO: 640 - DNA, 591 bp, Homo sapiens; identical to SEQ ID NO: 181

SEQ ID NO: 641 - DNA, 630 bp, Homo sapiens; identical to SEQ ID NO: 197

SEQ ID NO: 642 - DNA, 233 bp, Homo sapiens; identical to SEQ ID NO: 198

SEQ ID NO: 643 - DNA, 530 bp, Homo sapiens; identical to SEQ ID NO: 203

SEQ ID NO: 644 - DNA, 612 bp, Homo sapiens; identical to SEQ ID NO: 207

SEQ ID NO: 645 - DNA, 891 bp, Homo sapiens; identical to SEQ ID NO: 228

SEQ ID NO: 646 - DNA, 438 bp, Homo sapiens; identical to SEQ ID NO: 232

SEQ ID NO: 647 - DNA, 433 bp, Homo sapiens; identical to SEQ ID NO: 257

SEQ ID NO: 648 - DNA, 350 bp, Homo sapiens; identical to SEQ ID NO: 259
  misc_feature: n=a,t,g or c

SEQ ID NO: 649 - DNA, 430 bp, Homo sapiens; identical to SEQ ID NO: 261

SEQ ID NO: 650 - DNA, 770 bp, Homo sapiens; identical to SEQ ID NO: 286

SEQ ID NO: 651 - DNA, 692 bp, Homo sapiens; identical to SEQ ID NO: 289

SEQ ID NO: 652 - DNA, 505 bp, Homo sapiens; identical to SEQ ID NO: 294

SEQ ID NO: 653 - DNA, 852 bp, Homo sapiens; identical to SEQ ID NO: 307

SEQ ID NO: 654 - DNA, 942 bp, Homo sapiens; identical to SEQ ID NO: 308

SEQ ID NO: 655 - DNA, 435 bp, Homo sapiens; identical to SEQ ID NO: 324

SEQ ID NO: 656 - DNA, 2862 bp, Homo sapiens; identical to SEQ ID NO: 332

SEQ ID NO: 657 - DNA, 630 bp, Homo sapiens; identical to SEQ ID NO: 335

SEQ ID NO: 658 - DNA, 255 bp, Homo sapiens; identical to SEQ ID NO: 337

What is claimed is:

1. A process for identifying an agent that modulates the activity of a cancer-related gene comprising:
(a) contacting a compound with a cell containing a gene that corresponds to a polynucleotide having a sequence selected from the group consisting of SEQ ID NO: 1-658 and under conditions promoting the expression of said gene; and
(b) detecting a difference in expression of said gene relative to when said compound is not present thereby identifying an agent that modulates the activity of a cancer-related gene.

2. The process of claim 1 wherein said gene has a sequence selected from the group consisting of SEQ ID NO: 1-658.

3. The process of claim 1 wherein the cell is a cancer cell, the sequence is selected from SEQ ID NO: 1-362 and the difference in expression is a decrease in expression.

4. The process of claim 2 wherein the cell is a cancer cell, the sequence is selected from SEQ ID NO: 1-362 and the difference in expression is a decrease in expression.

5. The process of claim 1 wherein the cell is a cancer cell, the sequence is selected from SEQ ID NO: 601-658 and the difference in expression is a decrease in expression.

6. The process of claim 2 wherein the cell is a cancer cell, the sequence is selected from SEQ ID NO: 601-658 and the difference in expression is a decrease in expression.

7. The process of claim 3, 4, 5 or 6 wherein the cancer cell is a prostate cancer cell.

8. The process of claim 3, 4, 5 or 6 wherein the cancer cell is a carcinoma cancer cell.

9. The process of claim 3, 4, 5 or 6 wherein the cancer is adenocarcinoma.

10. The process of claim 1 wherein the cell is a non-cancerous cell, the sequence is selected from SEQ ID NO: 363-600 and the difference in expression is an increase in expression.

11. The process of claim 10 wherein the cell is a cell from prostate.

12. The process of claim 2 wherein the cell is a non-cancerous cell, the sequence is selected from SEQ ID NO: 363-600 and the difference in expression is an increase in expression.

13. The process of claim 12 wherein the cell is a cell from prostate.

14. The process of claim 1-13 wherein expression is determined for more than one said gene.

15. The process of claim 1-13 wherein expression is determined for at least 5 said genes.

16. The process of claim 1-13 wherein expression is determined for at least 10 said genes.

17. The process of claim 1-13 wherein expression is determined for all said genes of step (a).

18. A process for identifying an anti-neoplastic agent comprising contacting a cell exhibiting neoplastic activity with a compound first identified as a cancer related gene modulator using a process of one of claims 1-17 and detecting a decrease in said neoplastic activity after said contacting compared to when said contacting does not occur.

19. The process of claim 18 wherein said neoplastic activity is accelerated cellular replication.

20. The process of claim 18 wherein said decrease in neoplastic activity results from the death of the cell.

21. A process for identifying an anti-neoplastic agent comprising administering to an animal exhibiting a cancer condition an effective amount of an agent first identified according to a process of one of claims 1-20 and detecting a decrease in said cancerous condition.

22. A process for determining the cancerous status of a cell, comprising determining the level of expression in said cell of at least one gene that corresponds to a polynucleotide having a sequence selected from the group consisting of SEQ ID NO: 1-658 wherein an elevated expression relative to a known non-cancerous cell when the sequence is one of SEQ ID NO: 1-362 and 601-658 or a reduced expression relative to a known non-cancerous cell when the sequence is one of SEQ ID NO: 363-600 indicates a cancerous state or potentially cancerous state.

23. The process of claim 22 wherein the cell is a cell from prostate.

24. The process of claim 22 wherein when said elevated expression is elevated expression of a gene corresponding to SEQ ID NO: 1-362 the cancer to be determined is a carcinoma.

25. The process of claim 22 wherein when said elevated expression is elevated expression of a gene corresponding to SEQ ID NO: 601-658 the cancer to be determined is a carcinoma.

26. The process of claim 24 or 25 wherein said carcinoma is adenocarcinoma.

27. The process of claim 22 wherein a cDNA of the gene has the sequence of SEQ ID NO: 1-658.

28. The process of claim 22, 23, 24, 25, 26 or 27 wherein said expression is the expression of more than one said gene.

29. The process of claim 22, 23, 24, 25, 26 or 27 wherein said expression is the expression of at least 5 said genes.

30. The process of claim 22, 23, 24, 25, 26 or 27 wherein said expression is the expression of at least 10 said genes.

31. The process of claim 22, 23, 24, 25, 26 or 27 wherein said expression is the expression of all said genes.

32. A process for determining if a test gene is a cancer initiating or facilitating gene comprising contacting a cell expressing said test gene with an agent that decreases the expression of a gene that corresponds to a polynucleotide having a sequence selected from the group consisting of SEQ ID NO: 1-362 and 601-658, and detecting a decrease in expression of the test gene compared to when said agent is not present, thereby identifying said test gene as being a cancer initiating or facilitating gene.

33. The process of claim 32 wherein the gene determined by said process is an oncogene.

34. The process of claim 32 wherein the gene determined by said process is a cancer facilitating gene.

35. The process of claim 32 wherein said decrease in expression is due to a decrease in copy number of said gene in said cell or a cell derived from said cell.

36. A process for determining if a test gene is a cancer suppressor gene comprising contacting a cell expressing said test gene with an agent that increases the expression of a gene that corresponds to a polynucleotide having a sequence selected from the group consisting of SEQ ID NO: 363-600 and detecting an increase in expression of said test gene compared to when said agent is not present, thereby identifying said test gene as being a cancer suppressor gene.

37. The process of claim 36 wherein said increase in expression is due to an increase in copy number of said gene in said cell or a cell derived from said cell.

38. A process for treating cancer comprising contacting a cancerous cell with an agent having activity against an expression product encoded by a gene sequence selected from the group consisting of SEQ ID NO: 1-362 and 601-658.

39. The process of claim 38 wherein said cancerous cell is contacted in vivo.

40. The process of claim 38 wherein said agent has affinity for said expression product.

41. The process of claim 40 wherein said agent is an antibody.

42. The process of claim 38 wherein said agent is an apoptosis-inducing agent.

43. A method for producing a product comprising identifying an agent according to the process of claim 1-21 wherein said product is the data collected with respect to said agent as a result of said process and wherein said data is sufficient to convey the chemical structure and/or properties of said agent.

44. A process for treating a cancerous condition in an animal afflicted therewith comprising administering to said animal a therapeutically effective amount of an agent first identified as having anti-neoplastic activity using the process of claim 21.

45. A process for protecting an animal against cancer comprising administering to an animal at risk of developing cancer a therapeutically effective amount of an agent first identified as having anti-neoplastic activity using the process of claim 21.

46. The process of claim 44 or 45 wherein said cancer is prostate cancer.

47. The process of claim 44 or 45 wherein said cancer is a carcinoma.

48. The process of claim 44 or 45 wherein said cancer is adenocarcinoma.

49. A process for determining functionally r elated genes comprising contacting one or more gene sequences selected from the group consisting of the sequences of SEQ ID NO: 1-658 with an agent that modulates expression of more than one gene in such group and thereby determining a subset of genes of said group.

50. The process of claim 49 wherein said functionally related genes are genes modulating the same metabolic pathway.

51. The process of claim 49 wherein said functionally related genes are genes encoding functionally related polypeptides.

52. The process of claim 49 wherein said functionally related genes are genes whose expression is modulated by the same transcription activator or enhancer sequence.

53. The process of claim 49 wherein said sequences are selected from SEQ ID NO: 1-362 and 601-658.

54. The process of claim 49 wherein said sequences are selected from SEQ ID NO: 363-600.
